(19) United States
(12) Patent Application Publication
(10) Pub. No.: US 2025/0171811 A1
(43) Pub. Date: May 29, 2025

(54) TYPE I-B CRISPR-ASSOCIATED TRANSPOSASE SYSTEMS

(71) Applicants: THE BROAD INSTITUTE, INC., Cambridge, MA (US); MASSACHUSETTS INSTITUTE OF TECHNOLOGY, Cambridge, MA (US)

(72) Inventors: Feng Zhang, Cambridge, MA (US); Makoto Saito, Cambridge, MA (US); Guilhem Faure, Cambridge, MA (US)

(21) Appl. No.: 19/043,619

(22) Filed: Feb. 3, 2025

Related U.S. Application Data
(63) Continuation of application No. PCT/US2023/071523, filed on Aug. 2, 2023.
(60) Provisional application No. 63/394,365, filed on Aug. 2, 2022.

(51) Int. Cl. C12N 15/90; C12N 9/12; C12N 9/22; C12N 9/64; C12N 15/11

(52) U.S. Cl. CPC C12N 15/907; C12N 9/1241; C12N 9/22; C12N 9/6408; C12N 15/111; C07K 2319/09; C12N 2310/20; C12Y 304/21092

(57) ABSTRACT

Systems and methods for targeted gene modification, targeted insertion, perturbation of gene transcripts, and nucleic acid editing. Novel nucleic acid targeting systems comprise components of CRISPR systems and transposable elements. CRISPR-associated transposons (CASTs) are bacterial RNA-guided Tn7-like transposons that can insert large DNA cargoes at targeted loci in bacteria. To adapt CAST for use on the human genome, Applicants screened 30 CAST I-B systems for activity on extrachromosomal DNA in human cells. Of the six active orthologs identified, Applicants engineered a I-B2 system from Tolypothrix sp. PCC7910 (TolCAST) to achieve RNA-guided DNA insertion in the genome of living human cells.

### CROSS-REFERENCE TO RELATED APPLICATIONS

[0001] This application is a continuation of International Application No. PCT/US2023/071523 filed Aug. 2, 2023, which claims the benefit of U.S. Provisional Application No. 63/394,365, filed Aug. 2, 2022. The entire contents of the above-identified applications are hereby fully incorporated herein by reference.

### STATEMENT REGARDING FEDERALLY SPONSORED RESEARCH

[0002] This invention was made with government support under Grant Nos HL141201 and HG009761 awarded by the National Institutes of Health. The government has certain rights in the invention.

### SEQUENCE LISTING

[0003] This application contains a sequence listing filed in electronic form as an xml file entitled BROD-5605US_ST26.xml, created on Feb. 2, 2025, and having a size of 3,202,615 bytes. The content of the sequence listing is incorporated herein in its entirety.

### TECHNICAL FIELD

[0004] The subject matter disclosed herein is generally directed to systems, methods and compositions used for targeted gene modification, targeted insertion, perturbation of gene transcripts, and nucleic acid editing. Novel nucleic acid targeting systems comprise components of Clustered Regularly Interspaced Short Palindromic Repeats (CRISPR) systems and transposable elements.

### BACKGROUND

[0005] Recent advances in genome sequencing techniques and analysis methods have significantly accelerated the ability to catalog and map genetic factors associated with a diverse range of biological functions and diseases. Precise genome targeting technologies are needed to enable systematic reverse engineering of causal genetic variations by allowing selective perturbation of individual genetic elements, as well as to advance synthetic biology, biotechnological, and medical applications. Although genome-editing techniques such as designer zinc fingers, transcription activator-like effectors (TALEs), or homing meganucleases are available for producing targeted genome perturbations, there remains a need for new genome engineering technologies that employ novel strategies and molecular mechanisms and are affordable, easy to set up, scalable, and amenable to targeting multiple positions within the eukaryotic genome. This would provide a major resource for new applications in genome engineering and biotechnology.

[0006] The CRISPR-Cas systems of bacterial and archaeal adaptive immunity show extreme diversity of protein composition, genomic loci architecture, and system function. Systems comprising CRISPR-like components are widespread and continue to be discovered. Novel multi-subunit effector complexes and single-subunit effector modules may be developed as powerful genome engineering tools.

[0007] Citation or identification of any document in this application is not an admission that such document is available as prior art to the present invention.

### SUMMARY

[0008] In one aspect, the present disclosure provides an engineered system, the system comprising: one or more CRISPR-associated Tn7 or Tn7-like transposase polypeptides or functional fragments thereof; one or more Type I-B Cas proteins; and a guide molecule capable of complexing with the Type I-B Cas protein and directing binding of the guide-Cas protein complex to a target polynucleotide, wherein the system is capable of reproducible insertions. In example embodiments, the system is capable of reproducible insertions which can be measured as a frequency of unique insertion reads. In an aspect, the frequency of unique insertion reads is greater than about 10%.

[0009] In example embodiments, the target polynucleotide is mtDNA. In example embodiments, the insertion is about 80 to 100 base pairs, more preferably 80 to 95 nucleotides, after PAM of the target polynucleotide. In example embodiments, the system further comprises one or more epigenetic modifiers, epigenetic readers, DNA damage repair enzymes, or Poly (ADP-ribose) polymerases (PARPs). In example embodiments, the epigenetic modifier is a histone deacetylase (HDAC), histone acetyltransferase or histone demethylase. In example embodiments, the Type I-B Cas protein is IB-43. In example embodiments, the one or more CRISPR-associated Tn7 or Tn7-like transposases comprise TnsA, TnsB, TnsC, and/or TniQ.

[0010] In an embodiment, the one or more Type I-B Cas proteins comprises Cas5, Cas6, Cas7, Cas 8, Cas 11, or a combination thereof. In example embodiments, the one or more Type I-B Cas proteins comprises a Cas11. In example embodiments, the Cas11 is selected from the group consisting of SEQ ID NO: 1197, 1198, 1199, 1200, or Table A. In example embodiments, the engineered system described herein further comprises a ClpX. In example embodiments, the ClpX is selected from the group consisting of SEQ ID NO: 1201, 1202, 1203, 1204, Table B, or the National Center for Biotechnology Information Sequence Read Archive under GEO accession GSE223174. In example embodiments, each of the one or more Tn7 transposase polypeptides is independently derived from a same or different species. In example embodiments, each of the one or more Type I-B Cas proteins is derived from a same or different species. In example embodiments, the species are selected from IB3, IB4, IB7, IB16, IB20, IB21, IB25, IB27, IB32, IB34, IB36, IB42, IB43, IB45, IB46, IB47, IB48, IB49. In example embodiments, the TnsA and TnsB are comprised in a single protein (TnsAB).

[0011] In an embodiment, the system further comprises a donor polynucleotide. In an embodiment, the donor polynucleotide comprises a polynucleotide insert, a left element sequence, and a right element sequence. In example embodiments, the system further comprises a nuclear localization signal (NLS). In example embodiments, the NLS is located at the N-terminus and/or the C-terminus. In example embodiments, the NLS is located at the N-terminus. In example embodiments, the NLS is located on the TnsA, TnsB, TnsAB, TnsC, TniQ, Cas5, Cas6, Cas7, Cas8, Cas11, or any combination thereof. In example embodiments, the NLS is located on the Cas5, Cas6, Cas7, Cas8, Cas11, TniQ, TnsC, and/or TnsX wherein TnsX is TnsAB or TnsA and TnsB.

[0012] In another aspect, the present disclosure provides a system comprising one or more polynucleotides encoding: one or more CRISPR-associated Tn7 or Tn7-like transposase polypeptides; one or more Type I-B Cas proteins; a guide molecule capable of complexing with the Type I-B Cas protein and directing binding of the guide-Cas protein complex to a target polynucleotide or a combination thereof is encoded by a one or more polynucleotides. In example embodiments, the system further comprises a donor polynucleotide. In example embodiments, the donor polynucleotide comprises a polynucleotide insert, a left element sequence, and a right element sequence. In example embodiments, the one or more polynucleotides are mRNA. In example embodiments, a polynucleotide comprising the guide molecule comprises of a spacer flanked on both sides by one or more direct repeats. In example embodiments, the system further comprises a cargo.

[0013] In an embodiment, the system further comprises a donor polynucleotide. In an embodiment, the donor polynucleotide comprises a polynucleotide insert, a left element sequence, and a right element sequence. In an embodiment, the system comprises one or more polynucleotides or encoded products of the polynucleotides in one or more loci in Table 7. In an embodiment, the one or more polynucleotides encode components (a)-(c) of the system. In an embodiment, the one or more Type I-B Cas proteins comprises Cas5, Cas6, Cas7, and/or Cas 8. In an embodiment, the system comprises a first polynucleotide encoding a first Cas6 and a second polynucleotide encoding a second Cas6.

[0014] In another aspect, the present disclosure provides a vector comprising the one or more polynucleotides herein.

[0015] In another aspect, the present disclosure provides an engineered cell comprising a system described herein, or the vector herein. In example embodiments, the cell produces and/or secretes an endogenous or non-endogenous biological product or chemical compound. In example embodiments, the biological product is a protein or an RNA.

[0016] In another aspect, the present disclosure provides a cell line comprising the engineered cell herein and progeny thereof.

[0017] In another aspect, the present disclosure provides a plant, fungi, protist, or animal model comprising the engineered cell herein and progeny thereof.

[0018] In another aspect, the present disclosure provides a composition comprising the engineered cell herein.

[0019] In another aspect, the present disclosure provides an engineered cell or progeny thereof, the cell being engineered by use of the system herein. In an embodiment, the cell or progeny thereof is isolated. In an embodiment, the cell or progeny thereof is further used as a therapeutic. In an embodiment, the cell or progeny thereof include those from which a product is isolated.

[0020] In another aspect, the present disclosure provides a product produced by the cell or progeny thereof herein. In an embodiment, the product is a protein or an RNA. In an embodiment, the protein comprises a mutation.

[0021] In another aspect, the present disclosure provides a method of inserting a donor polynucleotide into a target polynucleotide in a cell, the method comprises introducing to the cell: one or more CRISPR-associated Tn7 or Tn7-like transposases or functional fragments thereof; one or more Type I-B Cas proteins; and a guide molecule capable of complexing with the Type I-B Cas protein and directing binding of the guide-Cas protein complex to a target polynucleotide wherein the system is capable of reproducible insertions. In example embodiments, the target polynucleotide is linear, circular, mitochondrial or genomic DNA.

[0022] In an embodiment, the donor polynucleotide introduces one or more mutations to the target polynucleotide, corrects a premature stop codon in the target polynucleotide, disrupts a splicing site, restores a splicing site, or a combination thereof. In example embodiments, the cell is a prokaryotic cell. In example embodiments, the cell is a eukaryotic cell.

[0023] In example embodiments, insertion of the donor polynucleotide into the target polynucleotide in the cell results in a cell or population of cells comprising altered expression levels of one or more gene products; a cell or population of cells that produces and/or secrete an endogenous or non-endogenous biological product or chemical compound. In example embodiments, the system further comprising one or more epigenetic modifiers, epigenetic readers, DNA damage repair enzymes, or Poly (ADP-ribose) polymerases (PARPs), wherein the method improves access to the target polynucleotide.

[0024] These and other aspects, objects, features, and advantages of the example embodiments will become apparent to those having ordinary skill in the art upon consideration of the following detailed description of illustrated example embodiments.

### BRIEF DESCRIPTION OF THE DRAWINGS

[0025] An understanding of the features and advantages of the present invention will be obtained by reference to the following detailed description that sets forth illustrative embodiments, in which the principles of the invention may be utilized, and the accompanying drawings of which:

[0026] FIG. 1 (SEQ ID NO: 1) shows exemplary human genome targeting by CAST I-B for SCL35A2 with insertion site, and readout: junction PCR (one primer on donor/one primer on target) for both sides.

[0027] FIG. 2A-2C shows LINE1 ORF2 targeting (ID114) by PmcCAST system (2A) shows example insertion; (2B) insertion distance from PAM measured by right end (RE) junction and left end (LE) junction; (2C) (SEQ ID NO: 2-21) right end junction sequence with prospective target-site duplication (TSD) and left end junction sequence, each with donor sequence and target sequence shown.

[0028] FIG. 3A-3B shows results of single locus targeting by PmcCAST (3A) insertion distance from PAM measured by LE junction (upper panels) and measured by RE junction (lower panels); (3B) (SEQ ID NO: 22-25) LE junction sequence and RE junction sequence with prospective TSD.

[0029] FIG. 4A-4B shows exemplary IB subtype1 system works on human genome (4A) examples of insertion positions about 70-90 bp downstream of PAM for AvCASTm IB29 and IB18; (4B) (SEQ ID NO: 26-30) an example of junction sequence confirmation for IB29 system, DNMT1 target (80 bp downstream from PAM) measured on RE side.

[0030] FIG. 5 shows plasmid with IB20 spacer positions on hs mtDNA.

[0031] FIG. 6A-6B shows example of trial with mitochondrion targeting sequence (MTS)-tagged CAST vectors (control: NLS-) (6A) exemplary set 1 and set 2 for trial; (6B) depiction of example guide configuration and experiment approach for co-transfection into 293 FT cells.

[0032] FIG. 7 shows results of number of insertion reads at distance from PAM, dark gray=MTS-, light gray: NLS-, 3 guides for junction PCR trial with purified mitochondria, see boxed results for MTID12, MTID18, MTID20.

[0033] FIG. 8 illustrates fractionation by 2 step centrifugation to achieve a prospective ‘mitochondria fraction in fractions 4-7.

[0034] FIG. 9A-9B shows results of fractionation, with insertion recovered from mitochondria (e.g., MTID12) (9A) gel, with arrow showing visible amplicon at mammalian experiment with 10⁷-10⁸ mtDNA copies (c.a. 100 pg-1 ng) in 12.5 ul PCR reaction; (9B) insertion reads by distance from PAM for each fraction 1-7.

[0035] FIG. 10 depicts quantification of unique insertion reads with a pDonor construct containing a 6N-Unique Molecular Identifier (UMI).

[0036] FIG. 11 shows results of investigation of tagging position preference based on LINE1 targeting by Pmc CAST1 measured in total insertion reads.

[0037] FIG. 12A-12B shows small compounds investigated for potential increase in efficiency of insertions with CAST1-B systems, including (12A) DNA damage repair enzymes and epigenetic modifiers and reader and (12B) epigentic modifiers, Poly (ADP-ribose) polymerases (PARPs) and topoisomerases.

[0038] FIG. 13 shows small scale compound screen on LINE1 by Pmc CAST I-B with 12 bulogical replicates no treatment control.

[0039] FIG. 14A-14B shows CAST IB43 can target single loci on the human genome. NGS Insertion reads, LE side; insertions ˜90 bp after PAM. ˜72/92 guides tested showed insertions ˜90 bp after PAM. (14A) depicts 6N-UMI-PS1-LE-500 bp Cargo-RE configuration (14B) examples of insertion positions about ˜90 bp downstream of PAM for CAST IB43 guide.

[0040] FIG. 15 (SEQ ID NO: 31-33) shows an example VEGFA (guide ID78) LE side, insertion 90 bp after the PAM.

[0041] FIG. 16A-16B shows further examples CAST IB42 can also target single loci on the human genome. NGS Insertion reads, LE side; insertions ˜90 bp after PAM. ˜41/89 guides tested showed insertions ˜90 bp after PAM (16A) depiction of example guide configuration (16B) examples of insertion positions about ˜90 bp downstream of PAM for CAST IB43 for CSCR4, EMX1, and B2M loci.

[0042] FIG. 17 (SEQ ID NO: 34-37) shows an example B2M (guide ID87) LE side sequence result for CAST IB42, insertion 88 bp after the PAM.

[0043] FIG. 18A-C R6Korigin plasmid assay in mammalian cells (18A) illustrates plasmid assay (18B) Result of E. coli colonies introduced to CAST system (18C) (SEQ ID NO: 38-49) TSD is observed in each single pInsert species from E. coli colony.

[0044] FIG. 19 shows images of HA tagged HA-NLS-Tns tagged except one component Cas5, Cas6, Cas7 or Cas8.

[0045] FIG. 20 shows images of HA tagged HA-NLS-Cas except one component TnsAB, TnsC, TniQ, or all HA-tagged.

[0046] FIG. 21A-21B shows EMX1 ID12 guide results. The max number of cells in a well after incubation was ˜75,000. The number of cells sequenced=75000 cells*(2 uL/35 uL QE)=4285 cells. DL script+Geneious mapping (271 (UMI)/(4285 cells×2 (diploid))×100)=3.16% (21A) Examples of insertion positions between 80 and 90 bp downstream of PAM for IB12 guide and UMI counts as a function of the number of UMIs (21B) Top UMIs recorded.

[0047] FIG. 22A-22B shows CXCR4 ID34 guide results. Script (DL)+Geneious mapping (570 (UMI)/(4285 cells×2 (diploid))×100)=6. 65% (22A) Examples of insertion positions between 80 and 95 bp downstream of PAM for IB34 guide and UMI counts as a function of the number of UMIs (22B) Top UMIs recorded.

[0048] FIG. 23A-23B shows VEGFA ID78 guide results. Script (DL)+Geneious mapping (713 (UMI)/(4285 cells×2 (diploid))×100)=8. 32% (23A) Examples of insertion positions ˜90 bp downstream of PAM for CAST IB78 guide and UMI counts as a function of the number of UMIs (23B) Top UMIs recorded.

[0049] FIG. 24A-24B shows B2M ID78 guide results. Script (DL)+Geneious mapping (759 (UMI)/(4285 cells×2 (diploid))×100)=8. 86% (24A) Examples of insertion positions between 80 and ˜90 bp downstream of PAM for CAST IB87 guide and UMI counts as a function of the number of UMIs (24B) Top UMIs recorded.

[0050] FIG. 25A-25D shows UMI counts as a function of the number of UMIs (25A) IB43 plasmid targeting in 293 FT: 3199 UMI (0.001% of 10 ng transfected plasmid) (25B) IB43 plasmid targeting in HeLa: 1805 UMI (27C) IB42 plasmid targeting in 293 FT: 2099 UMI (27D) IB43 plasmid targeting in U2OS: 133 UMI.

[0051] FIG. 26A-26C IB43 shows reproducible insertions on human genome (26A) Number of unique insertion reads from each guide ID (26B) Examples of insertion positions between 87 bp to 90 bp downstream of PAM for DNMT1 IB21 guide and UMI counts as a function of the number of UMIs (26C) (SEQ ID NO: 50-61) Geneious mapping to simulated insertion 90 bp after PAM.

[0052] FIG. 27A-27B shows unique insertion read results for evaluation of IB43 tag position at N-terminal or C-terminal ends of each CAST IB system component with two different guides, (27A) Guide ID78 and (27B) Guide ID87.

[0053] FIG. 28 includes a violin plot of unique insertion reads for each CAST-I component with IDS-87 guide for N-terminal and C-terminal tagging. Violin plot for 128 samples classified by N-/C-tag (64 points for each condition).

[0054] FIG. 29A-29B shows experimental optimization of dilution of CAST components expression plasmid (29A) reaction conditions for optimizing QCascade and TnsAB/C expression plasmid amount, each N-/C-ORF 5 ng (for 96 well 100 ng transfection) is starting point (Sample1) and serially diluted (adjusted by GFP) (+Donor 10 ng+Guide ID87 20 ng for all samples) (29B) charts unique insertion read results for varying QCascade and Tns AB/C component amounts.

[0055] FIG. 30 shows unique insertion reads for example CAST IB Cas and Tn components at varying concentration. IB43 plasmid amount, 2 (10 ng/1 ng)\hat{ }7=128 combinations. 10 ng for each ORF (adjusted by GFP)×7 components=70 ng. +10 ng pDonor+20 ng pGuide (ID87): total 100 ng for 96 well transfection 2 (10 ng- OR 1 ng-)\hat{ }7 (proteins)=128 combinations.

[0056] FIG. 31 shows violin plots for 128 samples of unique insertion reads for example CAST IB Cas and Tn components at varying concentration. 128 combinations classified by 10 ng/1 ng each component (64 samples for each condition).

[0057] FIG. 32 shows unique insertion reads for each guide targeting 96 sites with optimized conditions (new) versus initial reaction conditions (old). TnsAB and TnsC tagged at the C-terminus were removed from plasmid pool, and N-terminal tagged TnsAB and C-terminal tagged TnsC plasmid amounts were reduced.

[0058] FIG. 33A-33B shows experiments optimizing pDonor and pGuide amount in reactions by dilution. (33A) reaction conditions for dilution of pDonor and pGuide, with pDonor 10 ng and pGuide (ID87) 20 ng as starting point in sample 1 with serial dilutions. pHelper of 70 ng used for all samples. (33B) charts unique insertion reads for varying pGuide amounts.

[0059] FIG. 34A-34B shows experiments optimizing reaction conditions by increasing portion of pDonor and pGuide amount in reactions. (33A) reaction conditions for dilution of pDonor and pGuide, with pDonor 50 ng and pGuide (ID87) 50 ng as starting point in sample 1 with serial dilutions. pHelper of 7 ng used for all samples. (33B) charts unique insertion reads for varying pGuide amounts.

[0060] FIG. 35 shows transfection results of example CAST IB43 system with B2M (ID87) guide transfection with all mRNA CAST components leads to insertions on the genome ˜80-90 bp after the PAM. Donor and guide are still delivered as plasmids.

[0061] FIG. 36A-36B shows Geneious mapping of insertion products from LE side junction by PCR for (36A) (SEQ ID NO: 62-64) Lipofectamine 3000 only; (36B) (SEQ ID NO: 65-67) Lipofectamine 3000+ TnsABC mRNA transfection leads to expected insertion products.

[0062] FIG. 37 unique insertion reads evaluating delivery methodology plasmid boost at mRNA CAST components. +Plasmid transfection for 1-7 protein component(s) and pDonor/pGuide (ID87). 7 mRNA co-transfection for Cas5,6,7,8, TnsAB, C, and TniQ (pseudoUTP+polyA). +CAST component (light gray)/+GFP (gray).

[0063] FIG. 38 shows violin plot for 128 samples classified by +/−plasmid boost for example CAST IB components (64 points for each condition). p<0.0001 Mann-Whitney test.

[0064] FIG. 39A-39B evaluates transfection methods of CAST IB. (39A) ransfection methods for example CAST IB43 system and VEGFA locus (ID78 guide) using plasmid for all components or plasmidQCascade+mRNA TnsAB/C; (39B) charts unique insertion reads for transfection methods with insertion distance from PAM.

[0065] FIG. 40 charts expected insertions occur in the genome ˜90 bp after the PAM for transfection components, even after passaging.

[0066] FIG. 41A-41B shows next generation sequencing (NGS) PCR gels for varying transfection conditions shown in FIG. 40 after (41A) first passage; (41B) after puro selection and second passage.

[0067] FIG. 42A-42B polyethylenimine with all DNA transfection shows RE side unique insertion reads (42A) (SEQ ID NO: 68-69) 2 days post transfection chart of insertion reads and Geneious mapping of RE insertion; (42B) (SEQ ID NO: 70-71) 3 passages and puro selection (genome extraction) chart of insertion reads and Geneious mapping of RE insertion.

[0068] FIG. 43 includes chart of ddPCR results of transfection conditions results for plasmid only, plasmid+RNA, or mRNA only by donor %.

[0069] FIG. 44 shows results of linear donor evaluation by unique insertion reads at LE junction for no modification and 5′ ends 5 nt PTO.

[0070] FIG. 45 depicts polycistronic vector construction for (all proteins+guide) for an example CAST IB system containing cassettes 1-5 (QCascade) interchangeably with each other, TnsA/B, TnsC and guide.

[0071] FIG. 46A-46B shows functionality test for QCascade component with a new tag. (46A) construct of cassettes 1-5 (QCascade) interchanging order of QCascade in Casette1-5 (25 constructs=5 positions×5 proteins). (46B) charts unique insertion reads with conditions: Light Gray (Previous): HA-SV40NLS-3XGSGSG-ORF (N-ORF) and Dark Gray (New): SV40NLS-GSG-ORF-GSGSGGSG (SEQ ID NO: 72)+N-TnsAB and N-TnsC.

[0072] FIG. 47 includes a gel with expression of each example CAST IB component from polycistronic vector with each tag.

[0073] FIG. 48A-48B details IB43 polycistronic 14 helpers trial (48A) depicts IB43 polycistronic vector for 14 helpers trial (Q8XXX-AB-IRES-C+guide ID87); (48B) charts unique insertion reads 48 hours after transfection for plasmid donor and linear donor for each reaction condition.

[0074] FIG. 49 shows monocistronic p Helepers transfection results by unique insertion reads for plasmid donor and linear donor.

[0075] FIG. 50 shows polycistronic pHelepers transfection results by unique insertion reads for plasmid donor and linear donor, B2M guide (ID87).

[0076] FIG. 51 shows IB43-TnsAB and TnsC mutants on mammalian genome targeting. E62, D104, K119: Catalytic core of TnsA part. D519, D588, E624: Catalytic core of TnsB part. H164 of IB43 TnsC=A225 of Canonical Tn7 TnsC (A225V is hyperactive mutant). Overall, linear donor is less efficient than plasmid donor.

[0077] FIG. 52A-52B shows I-B Subtype2 compatibility with IB43 (as IB43 belongs Subtype2). Note: IB20, IB42, IB43 are only active subtype2 orthologs on human genome (52A) Various Cas and Tn proteins unique insertion reads with IB43 (52B) Heatmap illustrating IB orthologs compatible with various Cas and Tn proteins.

[0078] FIG. 53 shows unique insertion reads with various combinations of Cas and Tn proteins. Cas5: IB45, Cas6: IB48, Cas7: IB48, Cas8: IB16, TnsAB: IB43, TnsC: IB25, TniQ: IB36.

[0079] FIG. 54 shows human safe harbor loci targeting with 48 guides. 48 guides on CCR5, humanRosa26, H11 and additional 2 loci.

[0080] FIG. 55 shows UMI counting with sfGFP fusion constructs for IB43. Red: HA-NLS (SV40)-GSlinker-ORF; Blue: HA-NLS (SV40)-sfGFP-Gslinker-ORF.

[0081] FIG. 56A-56B human genome targeting by BhdCas 12b-IB43Q+IB43AB and IB43C (56A) (SEQ ID NO: 73-74) LINE1 targeting: 2 reads (1 UMI) out of total 120339 reads 81 bp downstream after PAM, PAM-LE-cargo-RE direction (same as native IB43) (56B) (SEQ ID NO: 75-76) H11 safe harbor locus targeting: 2 reads (1 UMI) out of total 58914 reads 61 bp downstream after PAM, PAM-RE-cargo-LE direction (opposite to native IB43).

[0082] FIG. 57A-57B shows insertion reads for dCas12a, dCas12b, dCasPhi, native IB43 comparison (Cas12X-TniQ+ TnsAB, C from IB43). Alicyclobacillus acidiphilus (Aa), Alicyclobacillus kakegawensis (Ak) CasPhi is from Pausch et al., Science, 2020.

[0083] FIG. 58 shows IB43 from transfected HEK293FTs can facilitate plasmid targeting in vitro.

[0084] FIG. 59 gel indicating expected LE junction PCR band at 465 bp is visible for in vitro CAST-transfected cell lysate reaction with 100 ng pTarget spike-in.

[0085] FIG. 60A-60B Models of transposition mechanisms of CAST I-B and CAST V-K systems. (60A) shows prototypical loci organization of CAST I-B and CAST V-K systems. The loci are delimited by transposon ends (Tn ends, indicated as light vertical rectangle). Transposon core components (tnsA, tnsB, and tnsC in CAST I-B; tnsB and tnsC in CAST V-K) are colored in light blue while tniQ are indicated in purple with a lighter purple for tnsD. Cas components (Cascade and cas12k) are shown in gray. Conserved transcription factors (TF) are shown in pink. Locations of cargo genes are indicated with dark gray circles. CRISPR arrays are shown as gray triangles for the repeats and red diamonds for the spacers. The delocalized crRNA is indicated by a lighter triangle (partial repeat) and a truncated red diamond (short spacer). Homing target sites are colored in yellow. Horizontal light gray triangle indicates the tracrRNA in the CAST V-K locus. Conserved transcription factors (TF) are shown in light pink. (60B) shows models for CAST transposition to mobile element (donor cell in blue) and CAST homing transposition to bacterial chromosome (recipient cell in green). CAST transposition to mobile genetic elements is mediated by the Cas effector machinery (IB Cascade and crRNA or Cas12k, tracrRNA, and cRNA; Cas proteins are shown in gray) that recognizes the target site (red) with RNA-guided targeting to insert the transposon using Tn components. TniQ may function as an adaptor between Cas machinery and the transpososome (Tn core machinery bound to the DNA transposon). The mobile genetic element (MGE) where the transposon has inserted can be horizontally transferred (via horizontal gene transfer (HGT)) to another host where homing transposition can occur. CAST I-B homing transposition is mediated by TnsD (without Cas components), which targets the homing site (light orange) located in the bacterial chromosome (in green). CAST V-K uses a dedicated crRNA to target the homing site.

[0086] FIG. 61A-61F—RNA-guided targeted DNA integration on transfected plasmids by type I-B CAST in human cells. (61A) Schematic of type I-B CRISPR-associated transposase (CAST) systems. (61B) Phylogenetic tree of TnsC extracted from 30 type I-B contigs tested in this study and from the canonical E. coli Tn7 locus (Tn7). Colors indicate the I-B1 (green) and I-B2 (blue) systems. Bootstrap values are indicated for the 2 I-B clades. (61C) Schematic of protospacer adjacent motif (PAM) screen in HEK293FT cells. pHelpers (expression vectors for Tn machinery, TniQ and Cascade), pDonor (a 0.7-kb cargo flanked by the predicted transposon right end (RE) and left end (LE)), pGuide (carrying a spacer for protospacer1 (PSP1) on pTarget with two direct repeats (DRs) under the human U6 promoter), and pTarget (containing the PSP1 site flanked by a library of PAM motifs) were co-transfected. Junctions containing PAM and transposon ends were amplified for downstream deep-sequencing analysis. (61D) PAM sequences and insertion positions for 6 active orthologs. (61E) Schematic of the transposition assay with R6K-origin plasmid in mammalian cells. (61F) (SEQ ID NO: 77-78) Whole plasmid sequencing with Tn5 tagmentation for recovery of pInsert. pInsert was extracted from HEK293FT cells transfected with I-B2 Tolypothrix CAST (TolCAST) components and then amplified by E. coli. Sequences of each isolated plasmid clone were confirmed. Reads mapped on both transposon end junctions are shown. Red rectangle indicates target site duplication (TSD).

[0087] FIG. 62A-62F—Programmable RNA-guided DNA integration on the human genome by type I-B2 TolCAST. (62A) Schematic of the quantification methodology for type I-B2 TolCAST-mediated targeted DNA integration on the human genome in HEK293FT cell lines. pHelpers, pGuide with spacer targeting the human genome, and pDonor containing unique molecular identifiers (UMIs) were co-transfected. Junctions for each transposon end were amplified for downstream deep-sequencing analysis. The number of unique insertion reads including UMIs was quantified. (62B) UIRs (SEQ ID NO: 79-94) (within an 80-100-bp window downstream of the PAM) at 96 targeted loci in the human genome by TolCAST. Representative deep-sequencing reads of LE and RE junctions as well as UMIs for guide RNA 87 targeting B2M are shown. (62C) 128 combinations of N-terminal or C-terminal tagged TolCAST components (2\hat{ }7 components) were tested for insertion activity at B2M. Results were divided into two groups by NLS position for the indicated component. (62D) 128 combinations of pHelper 10% of 1% of total amount of transfected DNA spike-in ((2\hat{ }7 components) were tested for insertion activity at B2M. Results were divided into two groups by the amount of the indicated component. (62E) Top: Schematic of polycistronic pHelper (pHelper₍ₚ₎) expression plasmid encoding all 7 proteins with EGFP separated by IRES and P2A peptides. 14 permutations of the order of QCascade components (cas5, cas6, cas7, cas8, and tniQ) were tested. Bottom: UIRs for each condition within a 80- to 100-bp window downstream of the PAM. (62F) In vitro transcribed (IVT) mRNAs encoding TolCAST protein components or pHelpers were co-transfected with B2M-targeting guide 87 and pDonor, and UIRs at each insertion position within a 80- to 100-bp window downstream of the PAM were quantified.

[0088] FIG. 63—PCR amplicons containing PAM and transposon ends on agarose gel. Target spacer indicates PCR amplicons from pInsert with PSP1 while shuffled spacer indicates those with shuffled PSP1. A red rectangle for each ortholog demonstrates the existence of specific amplicons in the sample with target guide. Top; 3 I-B1 orthologs AvCAST, AnCAST and NosCAST. Right; 3 I-B2 orthologs PmcCAST, NdCAST, and TolCAST.

[0089] FIG. 64—Unique insertion reads (UIRs) are correlated with CAST insertion activity. Insertion efficiency of six TnsAB catalytic mutants were tested. E62Q, D104N and K119Q are TnsA-part mutants of TnsAB, D104 and K119, while D519N, D588N and E624Q are TnsB-part mutants of TnsAB.

[0090] FIG. 65A-65D—(65A) UIRs for 128 combinations of N-terminal or C-terminal tagged TolCAST components (2\hat{ }7 components) were tested for insertion activity at B2M. (65B) Results in (65A) were divided into two groups by NLS position for the indicated component. Results of TnsAB and TnsC are shown in FIG. 62C. (65C) UIRs for 128 combinations of pHelper 10% of 1% of total amount of transfected DNA spike-in (2\hat{ }7 components) were tested for insertion activity at B2M. (65D) Results were divided into two groups by the amount of the indicated component. Results of TnsAB and TnsC are shown in FIG. 62D.

[0091] FIG. 66—UIRs (within an 80-100-bp window downstream of the PAM) at 96 targeted loci in the human genome by TolCAST. UIRs before the optimization (FIGS. 62C and 62D) and after the optimization are shown in comparison. The results before the optimization are also shown in FIG. 62B.

[0092] The figures herein are for illustrative purposes only and are not necessarily drawn to scale.

### DETAILED DESCRIPTION OF THE EXAMPLE EMBODIMENTS

### General Definitions

[0093] Unless defined otherwise, technical and scientific terms used herein have the same meaning as commonly understood by one of ordinary skill in the art to which this disclosure pertains. Definitions of common terms and techniques in molecular biology may be found in Molecular Cloning: A Laboratory Manual, 2^{nd} edition (1989) (Sambrook, Fritsch, and Maniatis); Molecular Cloning: A Laboratory Manual, 4^{th} edition (2012) (Green and Sambrook); Current Protocols in Molecular Biology (1987) (F. M. Ausubel et al. eds.); the series Methods in Enzymology (Academic Press, Inc.): PCR 2: A Practical Approach (1995) (M. J. MacPherson, B. D. Hames, and G. R. Taylor eds.): Antibodies, A Laboratory Manual (1988) (Harlow and Lane, eds.): Antibodies A Laboratory Manual, 2^{nd} edition 2013 (E. A. Greenfield ed.); Animal Cell Culture (1987) (R. I. Freshney, ed.); Benjamin Lewin, Genes IX, published by Jones and Bartlet, 2008 (ISBN 0763752223); Kendrew et al. (eds.), The Encyclopedia of Molecular Biology, published by Blackwell Science Ltd., 1994 (ISBN 0632021829); Robert A. Meyers (ed.), Molecular Biology and Biotechnology: a Comprehensive Desk Reference, published by VCH Publishers, Inc., 1995 (ISBN 9780471185710); Singleton et al., Dictionary of Microbiology and Molecular Biology 2^{nd} ed., J. Wiley & Sons (New York, N.Y. 1994), March, Advanced Organic Chemistry Reactions, Mechanisms and Structure 4th ed., John Wiley & Sons (New York, N.Y. 1992); and Marten H. Hofker and Jan van Deursen, Transgenic Mouse Methods and Protocols, 2^{nd} edition (2011).

[0094] As used herein, the singular forms “a”, “an”, and “the” include both singular and plural referents unless the context clearly dictates otherwise.

[0095] The term “optional” or “optionally” means that the subsequent described event, circumstance or substituent may or may not occur, and that the description includes instances where the event or circumstance occurs and instances where it does not.

[0096] The recitation of numerical ranges by endpoints includes all numbers and fractions subsumed within the respective ranges, as well as the recited endpoints.

[0097] The term “about” in relation to a reference numerical value and its grammatical equivalents as used herein can include the numerical value itself and a range of values plus or minus 10% from that numerical value. For example, the amount “about 10” includes 10 and any amounts from 9 to 11. For example, the term “about” in relation to a reference numerical value can also include a range of values plus or minus 10%, 9%, 8%, 7%, 6%, 5%, 4%, 3%, 2%, or 1% from that value.

[0098] As used herein, a “biological sample” may contain whole cells and/or live cells and/or cell debris. The biological sample may contain (or be derived from) a “bodily fluid”. The present invention encompasses embodiments wherein the bodily fluid is selected from amniotic fluid, aqueous humour, vitreous humour, bile, blood serum, breast milk, cerebrospinal fluid, cerumen (earwax), chyle, chyme, endolymph, perilymph, exudates, feces, female ejaculate, gastric acid, gastric juice, lymph, mucus (including nasal drainage and phlegm), pericardial fluid, peritoneal fluid, pleural fluid, pus, rheum, saliva, sebum (skin oil), semen, sputum, synovial fluid, sweat, tears, urine, vaginal secretion, vomit and mixtures of one or more thereof. Biological samples include cell cultures, bodily fluids, cell cultures from bodily fluids. Bodily fluids may be obtained from a mammal organism, for example by puncture, or other collecting or sampling procedures.

[0099] The terms “subject,” “individual,” and “patient” are used interchangeably herein to refer to a vertebrate, preferably a mammal, more preferably a human. Mammals include, but are not limited to, murines, simians, humans, farm animals, sport animals, and pets. Tissues, cells and their progeny of a biological entity obtained in vivo or cultured in vitro are also encompassed.

[0100] The term “exemplary” is used herein to mean serving as an example, instance, or illustration. Any aspect or design described herein as “exemplary” is not necessarily to be construed as preferred or advantageous over other aspects or designs. Rather, use of the word exemplary is intended to present concepts in a concrete fashion.

[0101] A protein or nucleic acid derived from a species means that the protein or nucleic acid has a sequence identical to an endogenous protein or nucleic acid or a portion thereof in the species. The protein or nucleic acid derived from the species may be directly obtained from an organism of the species (e.g., by isolation), or may be produced, e.g., by recombination production or chemical synthesis.

[0102] Various embodiments are described hereinafter. It should be noted that the specific embodiments are not intended as an exhaustive description or as a limitation to the broader aspects discussed herein. One aspect described in conjunction with a particular embodiment is not necessarily limited to that embodiment and can be practiced with any other embodiment(s). Reference throughout this specification to “one embodiment”, “an embodiment,” “an example embodiment,” means that a particular feature, structure or characteristic described in connection with the embodiment is included in at least one embodiment of the present invention. Thus, appearances of the phrases “in one embodiment,” “in an embodiment,” or “an example embodiment” in various places throughout this specification are not necessarily all referring to the same embodiment, but may. Furthermore, the particular features, structures or characteristics may be combined in any suitable manner, as would be apparent to a person skilled in the art from this disclosure, in one or more embodiments. Furthermore, while some embodiments described herein include some but not other features included in other embodiments, combinations of features of different embodiments are meant to be within the scope of the invention. For example, in the appended claims, any of the claimed embodiments can be used in any combination.

[0103] All publications, published patent documents, and patent applications cited herein are hereby incorporated by reference to the same extent as though each individual publication, published patent document, or patent application was specifically and individually indicated as being incorporated by reference.

### Overview

[0104] The present disclosure provides engineered systems and methods for inserting a polynucleotide to a desired position in a target nucleic acid. In general, the systems comprise one or more transposases or functional fragments thereof, and one or more components of a sequence-specific nucleotide binding system, e.g., a Cas protein and a guide molecule.

[0105] In an embodiment, the present disclosure provides engineered systems comprising one or more CRISPR-associated Tn7 transposase polypeptides (e.g., TnsA, TnsB, TnsC, and/or TniQ; or TnsA, TnsB, TnsC, and/or TnsD) and one or more Type I-B Cas proteins. The systems may further comprise a guide molecule capable of complexing with the Cas protein and directing binding of the guide-Cas protein complex to a target polynucleotide. The present disclosure also includes polynucleotides encoding components of the nucleic acid targeting systems, and vector systems comprising one or more vectors comprising said polynucleotide. Further provided herein also includes cells, tissues, organs, and organisms comprising the systems or generated using the systems.

### Systems and Compositions

[0106] In one aspect, the present disclosure includes systems that comprise one or more transposases and nucleotide-binding molecules (e.g., nucleotide-binding proteins). The nucleotide binding proteins may be sequence-specific. The system may further comprise one or more transposon components. In embodiments, the systems described herein may comprise a transposase(s) that is associated with, linked to, bound to, or otherwise capable of forming a complex with a sequence-specific nucleotide-binding system. In one embodiment, the one or more transposases and the sequence-specific nucleotide-binding system are associated by co-regulation or expression. In one embodiment, the transposase(s) and sequence-specific nucleotide binding system are associated by the ability of the sequence-specific nucleotide-binding domain to direct or recruit the transposase(s) to an insertion site where the transposase(s) direct insertion of a donor polynucleotide into a target polynucleotide sequence. A sequence-specific nucleotide-binding system may be a sequence-specific DNA-binding protein, or functional fragment thereof, and/or sequence-specific RNA-binding protein or functional fragment thereof. In an embodiment, a sequence-specific nucleotide-binding component may be a CRISPR-Cas system, a transcription activator-like effector nuclease, a Zn finger nuclease, a meganuclease, a functional fragment, a variant thereof, of any combination thereof. Accordingly, the system may also be considered to comprise a nucleotide binding component and a transposase. For ease of reference, further example embodiments will be discussed in the context of example Cas-associated transposase systems. The engineered systems are capable of reproducible insertions from 80 to 100 base pairs after the PAM.

[0107] In some examples, the system may be an engineered system, the system comprising one or more CRISPR-associated Tn7 transposase polypeptides or functional fragments thereof; one or more Type I-B Cas proteins; and a guide molecule capable of complexing with the Cas protein and directing binding of the guide-Cas protein complex to a target polynucleotide.

[0108] In an example embodiment, the system may comprise polynucleotides with sequences encoding the one or more transposases, Cas proteins, and guide sequences.

[0109] The system may be used to target various types of target polynucleotides. In some examples, the target polynucleotides may be linear DNA. In some examples, the target polynucleotides may be circular (e.g., supercoiled) DNA such as plasmids. In some examples, the target polynucleotides may genomic DNA. The target polynucleotide may be a polynucleotide in a eukaryotic cell. For example, the target polynucleotide may be a polynucleotide in the genome of a eukaryotic cell. The genome may be the nuclear genome, mitochondrial genome, or chloroplast genome. The target polynucleotide may be an endogenous polynucleotide in a eukaryotic cell.

[0110] When a term refers to a protein, e.g., Cas protein, transposase, etc., the term encompasses both the full-length of the protein as well as a functional fragment of the protein. The term “functional fragment” means that the sequence of the polypeptide may include less amino-acid than the original sequence but still enough amino-acids to confer the enzymatic activity of the original sequence of reference. It is well known in the art that a polypeptide can be modified by substitution, insertion, deletion and/or addition of one or more amino-acids while retaining its enzymatic activity. For example, substitutions of one amino-acid at a given position by chemically equivalent amino-acids that do not affect the functional properties of a protein are common.

### Transposons and Transposases

[0111] The systems herein may comprise one or more components of a transposon and/or one or more transposases. The transposases in the systems herein may be CRISPR-associated transposases (also used interchangeably with Cas-associated transposases, CRISPR-associated transposase proteins herein) or functional fragments thereof. CRISPR-associated transposases may include any transposases that can be directed to or recruited to a region of a target polynucleotide by sequence-specific binding of a CRISPR-Cas complex. CRISPR-associated transposases may include any transposases that associate (e.g., form a complex) with one or more components in a CRISPR-Cas system, e.g., Cas protein, guide molecule etc.). In an embodiment, CRISPR-associated transposases may be fused or tethered (e.g., by a linker) to one or more components in a CRISPR-Cas system, e.g., Cas protein, guide molecule etc.).

[0112] The term “transposon”, as used herein, refers to a polynucleotide (or nucleic acid segment), which may be recognized by a transposase or an integrase enzyme and which is a component of a functional nucleic acid-protein complex (e.g., a transpososome, or transposon complex) capable of transposition. Transposons employ a variety of regulatory mechanisms to maintain transposition at a low frequency and sometimes coordinate transposition with various cell processes. Some prokaryotic transposons can also mobilize functions that benefit the host or otherwise help maintain the element.

[0113] The term “transposase” as used herein refers to an enzyme, which is a component of a functional nucleic acid-protein complex capable of transposition and which mediates transposition. The transposase may comprise a single protein or comprise multiple protein subunits. A transposase may be an enzyme capable of forming a functional complex with a transposon end or transposon end sequences. The term “transposase” may also refer in an embodiment to integrases. The expression “transposition reaction” used herein refers to a reaction wherein a transposase inserts a donor polynucleotide sequence in or adjacent to an insertion site on a target polynucleotide. The insertion site may contain a sequence or secondary structure recognized by the transposase and/or an insertion motif sequence where the transposase cuts or creates staggered breaks in the target polynucleotide into which the donor polynucleotide sequence may be inserted. Exemplary components in a transposition reaction include a transposon, comprising the donor polynucleotide sequence to be inserted, and a transposase or an integrase enzyme. The term “transposon end sequence” as used herein refers to the nucleotide sequences at the distal ends of a transposon. The transposon end sequences may be responsible for identifying the donor polynucleotide for transposition. The transposon end sequences may be the DNA sequences the transpose enzyme uses in order to form transpososome complex and to perform a transposition reaction.

[0114] In an embodiment, the system comprises one or more Tn7 transposase polypeptides. In an embodiment, three transposon-encoded proteins form the core transposition machinery of Tn7: a heteromeric transposase (TnsA and TnsB) and a regulator protein (TnsC). In addition to the core TnsABC transposition proteins, Tn7 elements encode dedicated target site-selection proteins, TnsD and TnsE. In conjunction with TnsABC, the sequence-specific DNA-binding protein TnsD directs transposition into a conserved site referred to as the “Tn7 attachment site,” attTn7 via its C-terminal that binds directly with DNA. TnsD (e.g., TnsD1 and TnsD2) is a member of a large family of proteins that also includes TniQ (e.g., TniQ1 and TniQ2), a protein found in other types of bacterial transposons. TniQ has been shown to target transposition into resolution sites of plasmids. TniQ works with Cascade/Cas12k (CAST) for RNA guided transposition. TniQ is shorter version of TnsD comprising around 300 amino acids. TniQ also comprises of a N-terminal similar to that of TnsD but lacks the corresponding C-terminal. Therefore, TniQ interacts with the Cascade to bind DNA. The addition of a TnsD C-terminal to a TniQ would amount to a TnsD. As used herein, a TniQ transposase may be a TnsD transposase. In some examples, the Tn7 comprises a transposase that has the activities of typical TnsA and TnsB. In an example embodiment, the transposase that has the activities of typical TnsA and TnsB is a fusion protein and may also be referred to as TnsAB. In some examples, the transposase is not a fusion protein of typical TnsA and TnsB. An example of the transposase is TnsA in IB20.

[0115] Examples of Tn7 transposase polypeptides include TnsA, TnsB, TnsC, TniQ, TnsD, and TnsE. In an embodiment, the system comprises TnsA, TnsB, TnsC, and/or TniQ. In an embodiment, the system comprises TnsA, TnsB, TnsC, and/or TnsD (e.g., TnsD2). In some examples, the system comprises TnsA, TnsB, TnsC, and TniQ (e.g., TniQ2). In some examples, the system comprises TnsA, TnsB, TnsC, and TnsD (e.g., TnsD2). In some examples, the system comprises two or more TnsA. In some examples, the system comprises two or more TnsA (e.g., 2 TnsA). In some examples, the system comprises two or more TnsB (e.g., 2 TnsB). In some examples, the system comprises two or more TnsC (e.g., 2 TnsC). In some examples, the system comprises two or more TnsD (e.g., 2 TnsDs). In some examples, the system comprises two or more TniQ (e.g., 2 TniQs). The TniQ or TnsD may comprise a DNA-binding domain. The DNA-binding domain may be at the C terminus of the TniQ or TnsD. In some cases, the DNA-binding domain may be at the N terminus, or between the N- and C-termini of the TniQ or TnsD. In some cases, the system comprises TnsA, TnsB, TnsC, and only one TniQ or TnsD, e.g., such TniQ or TnsD may comprise a DNA-binding domain. In a particular example, the system comprises TnsA, TnsB, TnsC, and TnsD1. In another example, the system comprises TnsA, TnsB, TnsC, and TnsD2. In another example, the system comprises TnsA, TnsB, TnsC, TnsD1, and TnsD2. Two or more of the components in the system may be comprised in a single protein (e.g., fusion protein). For example, TnsA and TnsB may be comprised in a single protein.

[0116] In an embodiment, the system comprises one or more polynucleotides encoding one or more of the Tn7 transposase polypeptides. In some examples, the system comprises one or more polynucleotides encoding TnsA. In some examples, the system comprises one or more polynucleotides encoding TnsB. In some examples, the system comprises one or more polynucleotides encoding TnsC. In some examples, the system comprises one or more polynucleotides encoding TnsD. In some examples, the system comprises one or more polynucleotides encoding TnsE. In some examples, the system comprises one or more polynucleotides encoding TniQ. The system may comprise two or more polynucleotides encoding the same type of transposase. In one example, the system may comprise two or more polynucleotides encoding TnsA (the same or different TnsA). In one example, the system may comprise two or more polynucleotides encoding TnsB (the same or different TnsB). In one example, the system may comprise two or more polynucleotides encoding TnsC (the same or different TnsC). In one example, the system may comprise two or more polynucleotides encoding TnsD (the same or different TnsD). In one example, the system may comprise two or more polynucleotides encoding TnsE (the same or different TnsE). In one example, the system may comprise two or more polynucleotides encoding TniQ (the same or different TniQ).

[0117] As used herein, a right end sequence element or a left end sequence element are made in reference to an example Tn7 transposon. The general structure of the left end (LE) and right end (RE) sequence elements of canonical Tn7 is established. Tn7 ends comprise a series of 22-bp TnsB-binding sites. Flanking the most distal TnsB-binding sites is an 8-bp terminal sequence ending with 5′-TGT-3′/3′-ACA-5′. The right end of Tn7 contains four overlapping TnsB-binding sites in the ˜90-bp right end element. The left end contains three TnsB-binding sites dispersed in the ˜150-bp left end of the element. The number and distribution of TnsB-binding sites can vary among Tn7-like elements. End sequences of Tn7-related elements can be determined by identifying the directly repeated 5-bp target site duplication, the terminal 8-bp sequence, and 22-bp TnsB-binding sites (Peters J E et al., 2017). Example Tn7 elements, including right end sequence element and left end sequence element include those described in Parks A R, Plasmid, 2009 January; 61(1):1-14.

[0118] As used herein, Tn7 transposons and transposases include Tn7-like transposons and transposases.

### Donor Polynucleotides

[0119] The systems may comprise one or more donor polynucleotides (e.g., for insertion into the target polynucleotide). A donor polynucleotide may be an equivalent of a transposable element that can be inserted or integrated to a target site. For example, the donor polynucleotide may comprise a polynucleotide to be inserted, a left element sequence, and a right element sequence. The donor polynucleotide may be or comprise one or more components of a transposon. A donor polynucleotide may be any type of polynucleotides, including, but not limited to, a gene, a gene fragment, a non-coding polynucleotide, a regulatory polynucleotide, a synthetic polynucleotide, etc.

[0120] In an embodiment, the donor polynucleotide is linear. In an embodiment, the donor polynucleotide is circular. In some examples, the donor polynucleotide has a single strand break (a nick). In some cases, the single strand break is on or close to the 3′ end of the donor polynucleotide. In some cases, the single strand break is on or close to the 5′ end of the donor polynucleotide.

[0121] In an embodiment, the donor polynucleotide is inserted to a site no more than 80, no more 90, no more 100, no more 200, or no more 300 bp 3′ of the PAM. In some examples, the donor polynucleotide is inserted to a site that is 70, 71, 72, 73, 74, 75, 76, 77, 78, 79, 80, 81, 82, 83, 84, 85, 86, 87, 88, 89, 90, 91, 92, 93, 94, 95, 96, 97, 98, 99, 100, 101, 102, 103, 104, 105, 106, 107, 108, 109, 110, 111, 112, 113, 114, 115, 116, 117, 118, 119, 120, 121, 122, 123, 124, 125, 126, 127, 128, 129, 130, 131, 132, 133, 134, 135, 136, 137, 138, 139, 140, 141, 142, 143, 144, 145, 146, 147, 148, 149, 150, 151, 152, 153, 154, 155, 156, 157, 158, 159, 160, 161, 162, 163, 164, 165, 166, 167, 168, 169, 170, 171, 172, 173, 174, 175, 176, 177, 178, 179, 180, 181, 182, 183, 184, 185, 186, 187, 188, 189, 190, 191, 192, 193, 194, 195, 196, 197, 198, 199, 200, 201, 202, 203, 204, 205, 206, 207, 208, 209, 210, 211, 212, 213, 214, 215, 216, 217, 218, 219, 220, 221, 222, 223, 224, 225, 226, 227, 228, 229, 230, 231, 232, 233, 234, 235, 236, 237, 238, 239, 240, 241, 242, 243, 244, 245, 246, 247, 248, 249, 250, 251, 252, 253, 254, 255, 256, 257, 258, 259, 260, 261, 262, 263, 264, 265, 266, 267, 268, 269, 270, 271, 272, 273, 274, 275, 276, 277, 278, 279, 280, 281, 282, 283, 284, 285, 286, 287, 288, 289, 290, 291, 292, 293, 294, 295, 296, 297, 298, 299, or 300 bp 3′ of the PAM.

[0122] In an embodiment, the donor polynucleotide is inserted to a site no more than 80, no more 90, no more 100, no more 200, or no more 300 bp 5′ of the PAM. In some examples, the donor polynucleotide is inserted to a site that is 70, 71, 72, 73, 74, 75, 76, 77, 78, 79, 80, 81, 82, 83, 84, 85, 86, 87, 88, 89, 90, 91, 92, 93, 94, 95, 96, 97, 98, 99, 100, 101, 102, 103, 104, 105, 106, 107, 108, 109, 110, 111, 112, 113, 114, 115, 116, 117, 118, 119, 120, 121, 122, 123, 124, 125, 126, 127, 128, 129, 130, 131, 132, 133, 134, 135, 136, 137, 138, 139, 140, 141, 142, 143, 144, 145, 146, 147, 148, 149, 150, 151, 152, 153, 154, 155, 156, 157, 158, 159, 160, 161, 162, 163, 164, 165, 166, 167, 168, 169, 170, 171, 172, 173, 174, 175, 176, 177, 178, 179, 180, 181, 182, 183, 184, 185, 186, 187, 188, 189, 190, 191, 192, 193, 194, 195, 196, 197, 198, 199, 200, 201, 202, 203, 204, 205, 206, 207, 208, 209, 210, 211, 212, 213, 214, 215, 216, 217, 218, 219, 220, 221, 222, 223, 224, 225, 226, 227, 228, 229, 230, 231, 232, 233, 234, 235, 236, 237, 238, 239, 240, 241, 242, 243, 244, 245, 246, 247, 248, 249, 250, 251, 252, 253, 254, 255, 256, 257, 258, 259, 260, 261, 262, 263, 264, 265, 266, 267, 268, 269, 270, 271, 272, 273, 274, 275, 276, 277, 278, 279, 280, 281, 282, 283, 284, 285, 286, 287, 288, 289, 290, 291, 292, 293, 294, 295, 296, 297, 298, 299, or 300 bp 5′ of the PAM.

[0123] A target polynucleotide may comprise a protospacer adjacent motif (PAM) sequence. An example of the PAM sequence is AT.

[0124] The donor polynucleotides may be inserted to the upstream or downstream of the PAM sequence of a target polynucleotide. For CRISPR-associated transposases, the donor polynucleotide may be inserted at a position between 10 bases and 200 bases, e.g., between 20 bases and 150 bases, between 30 bases and 100 bases, between 45 bases and 70 bases, between 45 bases and 60 bases, between 55 bases and 70 bases, between 49 bases and 56 bases or between 60 bases and 66 bases, from a PAM sequence on the target polynucleotide. In some cases, the insertion is at a position upstream of the PAM sequence. In some cases, the insertion is at a position downstream of the PAM sequence. In some cases, the insertion is at a position from 49 to 56 bases or base pairs downstream from a PAM sequence. In some cases, the insertion is at a position from 60 to 66 bases or base pairs downstream from a PAM sequence.

[0125] The donor polynucleotide may be used for editing the target polynucleotide. In some cases, the donor polynucleotide comprises one or more mutations to be introduced into the target polynucleotide. Examples of such mutations include substitutions, deletions, insertions, or a combination thereof. The mutations may cause a shift in an open reading frame on the target polynucleotide. In some cases, the donor polynucleotide alters a stop codon in the target polynucleotide. For example, the donor polynucleotide may correct a premature stop codon. The correction may be achieved by deleting the stop codon or introduces one or more mutations to the stop codon. In other example embodiments, the donor polynucleotide addresses loss of function mutations, deletions, or translocations that may occur, for example, in certain disease contexts by inserting or restoring a functional copy of a gene, or functional fragment thereof, or a functional regulatory sequence or functional fragment of a regulatory sequence. A functional fragment refers to less than the entire copy of a gene by providing sufficient nucleotide sequence to restore the functionality of a wild type gene or non-coding regulatory sequence (e.g., sequences encoding long non-coding RNA). In an embodiment, the systems disclosed herein may be used to replace a single allele of a defective gene or defective fragment thereof. In another example embodiment, the systems disclosed herein may be used to replace both alleles of a defective gene or defective gene fragment. A “defective gene” or “defective gene fragment” is a gene or portion of a gene that when expressed fails to generate a functioning protein or non-coding RNA with functionality of the corresponding wild-type gene. In an embodiment, these defective genes may be associated with one or more disease phenotypes. In an embodiment, the defective gene or gene fragment is not replaced but the systems described herein are used to insert donor polynucleotides that encode gene or gene fragments that compensate for or override defective gene expression such that cell phenotypes associated with defective gene expression are eliminated or changed to a different or desired cellular phenotype.

[0126] In an embodiment of the invention, the donor may include, but not be limited to, genes or gene fragments, encoding proteins or RNA transcripts to be expressed, regulatory elements, repair templates, and the like. According to the invention, the donor polynucleotides may comprise left end and right end sequence elements that function with transposition components that mediate insertion.

[0127] In certain cases, the donor polynucleotide manipulates a splicing site on the target polynucleotide. In some examples, the donor polynucleotide disrupts a splicing site. The disruption may be achieved by inserting the polynucleotide to a splicing site and/or introducing one or more mutations to the splicing site. In certain examples, the donor polynucleotide may restore a splicing site. For example, the polynucleotide may comprise a splicing site sequence.

[0128] The donor polynucleotide to be inserted may have a size from 10 bases to 50 kb in length, e.g., from 50 to 40 kb, from 100 and 30 kb, from 100 bases to 300 bases, from 200 bases to 400 bases, from 300 bases to 500 bases, from 400 bases to 600 bases, from 500 bases to 700 bases, from 600 bases to 800 bases, from 700 bases to 900 bases, from 800 bases to 1000 bases, from 900 bases to from 1100 bases, from 1000 bases to 1200 bases, from 1100 bases to 1300 bases, from 1200 bases to 1400 bases, from 1300 bases to 1500 bases, from 1400 bases to 1600 bases, from 1500 bases to 1700 bases, from 600 bases to 1800 bases, from 1700 bases to 1900 bases, from 1800 bases to 2000 bases, from 1900 bases to 2100 bases, from 2000 bases to 2200 bases, from 2100 bases to 2300 bases, from 2200 bases to 2400 bases, from 2300 bases to 2500 bases, from 2400 bases to 2600 bases, from 2500 bases to 2700 bases, from 2600 bases to 2800 bases, from 2700 bases to 2900 bases, or from 2800 bases to 3000 bases in length.

[0129] The engineered systems disclosed herein are capable of reproducible insertions, insertions occurring at or near a distance from the PAM. In an aspect, the reproducible insertions are quantifiable. Insertions can be quantifiable by unique insertion reads which can be calculated through utilization of a unique molecular identifier. In an example embodiment, the unique insertion reads is calculated by the number of unique insertion reads×insertion positions at, for example 80-100 bp after PAM. A frequency of insertion reads can be calculated as:

(number of unique insertion reads)/(number of cells)×(ploidy)×100=% frequency of insertion reads.

### CRISPR-Cas Systems

[0130] The systems herein may comprise one or more components of a CRISPR-Cas system. The one or more components of the CRISPR-Cas system may serve as the nucleotide-binding component in the systems. The nucleotide-binding molecule may be a Cas protein (used interchangeably with CRISPR protein, CRISPR enzyme, Cas effector, CRISPR-Cas protein, CRISPR-Cas enzyme), a fragment thereof, or a mutated form thereof. The Cas protein may have reduced or no nuclease activity. For example, the Cas protein may be an inactive or dead Cas protein (dCas). The dead Cas protein may comprise one or more mutations or truncations. In some examples, the DNA binding domain comprises one or more Class I (e.g., Type I, Type III, Type IV) or Class 2 (e.g., Type II, Type V, or Type VI) CRISPR-Cas proteins. In an embodiment, the sequence-specific nucleotide binding domains directs a transposon to a target site comprising a target sequence and the transposase directs insertion of a donor polynucleotide sequence at the target site. In an embodiment, the transposon component includes, associates with, or forms a complex with a CRISPR-Cas complex. In one example embodiment, the CRISPR-Cas component directs the transposon component and/or transposase(s) to a target insertion site where the transposon component directs insertion of the donor polynucleotide into a target nucleic acid sequence.

[0131] In general, a CRISPR-Cas or CRISPR system as used in herein and in documents, such as International Patent Publication No. WO 2014/093622 (PCT/US2013/074667), refers collectively to transcripts and other elements involved in the expression of or directing the activity of CRISPR-associated (“Cas”) genes, including sequences encoding a Cas gene, a tracr (trans-activating CRISPR) sequence (e.g. tracrRNA or an active partial tracrRNA), a tracr-mate sequence (encompassing a “direct repeat” and a tracrRNA-processed partial direct repeat in the context of an endogenous CRISPR system), a guide sequence (also referred to as a “spacer” in the context of an endogenous CRISPR system), or “RNA(s)” as that term is herein used (e.g., RNA(s) to guide Cas, such as Cas9, e.g., CRISPR RNA and transactivating (tracr) RNA or a single guide RNA (sgRNA) (chimeric RNA)) or other sequences and transcripts from a CRISPR locus. In general, a CRISPR system is characterized by elements that promote the formation of a CRISPR complex at the site of a target sequence (also referred to as a protospacer in the context of an endogenous CRISPR system). See, e.g., Shmakov et al. (2015) “Discovery and Functional Characterization of Diverse Class 2 CRISPR-Cas Systems”, Molecular Cell, DOI: dx.doi.org/10.1016/j.molcel.2015.10.008.

[0132] In an embodiment, a protospacer adjacent motif (PAM) or PAM-like motif directs binding of the effector protein complex as disclosed herein to the target locus of interest. In an embodiment, the PAM may be a 5′ PAM (i.e., located upstream of the 5′ end of the protospacer). In other embodiments, the PAM may be a 3′ PAM (i.e., located downstream of the 5′ end of the protospacer). The term “PAM” may be used interchangeably with the term “PFS” or “protospacer flanking site” or “protospacer flanking sequence”.

[0133] In a preferred embodiment, the CRISPR effector protein may recognize a 3′ PAM. In an embodiment, the CRISPR effector protein may recognize a 3′ PAM which is 5′H, wherein H is A, C or U.

[0134] In the context of formation of a CRISPR complex, “target sequence” refers to a sequence to which a guide sequence is designed to have complementarity, where hybridization between a target sequence and a guide sequence promotes the formation of a CRISPR complex. A target sequence may comprise RNA polynucleotides. The term “target RNA” refers to an RNA polynucleotide being or comprising the target sequence. In other words, the target RNA may be an RNA polynucleotide or a part of a RNA polynucleotide to which a part of the gRNA, i.e., the guide sequence, is designed to have complementarity and to which the effector function mediated by the complex comprising CRISPR effector protein and a gRNA is to be directed. In an embodiment, a target sequence is located in the nucleus or cytoplasm of a cell.

[0135] The CRISPR-Cas systems herein may comprise a Cas protein and a guide molecule. In an embodiment, the system comprises one or more Cas proteins. The Cas proteins may be Type 1 Cas proteins, e.g., Cas proteins of Type I CRISPR-Cas systems.

[0136] In an embodiment, the CRISPR-Cas system is a Class 1 CRISPR-Cas system, e.g., a Class 1 Type I CRISPR-Cas system. In some cases, a Class I CRISPR-Cas system comprises Cascade (a multimeric complex comprising three, four, or five proteins that processes crRNA arrays), Cas3 (a protein with nuclease, helicase, and exonuclease activity that is responsible for degradation of the target DNA), and crRNA (stabilizes Cascade complex and directs Cascade and Cas3 to DNA target). In example embodiments, Class 1 CRISPR-Cas systems comprising Cas 3 and/or Cas3″ comprise single-stranded and/or double-stranded nuclease catalytic activity, i.e., they are catalytically-active systems against target polynucleotides. In example embodiments, Class 1 CRISPR-Cas systems not comprising Cas 3 and/or Cas3″ do not comprise single-stranded and/or double-stranded nuclease catalytic activity, i.e., they are catalytically-inactive or nuclease-deficient systems against target polynucleotides. A Class 1 CRISPR-Cas system may be of a subtype, e.g., Type I-A, Type I-B, Type I-C, Type I-D, Type I-E, Type I-F, Type I-U, Type III-A, Type III-B, Type-III-C, Type-III-D, or Type-IV CRISPR-Cas system.

[0137] The Class 1 type I CRISPR Cas system may be used to catalyze RNA-guided integration of mobile genetic elements into a target nucleic acid (e.g., genomic DNA). For example, the systems herein may comprise a complex between Cascade and a transposon protein. At a given distance downstream of a target nucleic acid, a donor nucleic acid (e.g., DNA) may be inserted. The insertion may be in one of two possible orientations. The system may be used to integrate a nucleic acid sequence of desired length. In some examples, the type I CRISPR-Cas system is nuclease-deficient. In some examples, the type I CRISPR-Cas system is Type I-B CRISPR-Cas system.

[0138] A Class 1 type I-A CRISPR-Cas system may comprise Cas7 (Csa2), Cas8a1 (Csx13), Cas8a2 (Csx9), Cas5, Csa5, Cas6a, Cas3″ and/or a Cas3. In an embodiment, the Class I type I-A containing CRISPR-Cas system comprising Cas7 (Csa2), Cas8a1 (Csx13), Cas8a2 (Csx9), Cas5, Csa5, Cas6a, Cas3″ and/or a Cas3 is catalytically active, i.e., possesses single-stranded and/or double-stranded nuclease activity due to the presence of Cas3 and/or Cas3″. A type I-B CRISPR-Cas system may comprise Cas6b, Cas8b (Csh1), Cas7 (Csh2) and/or Cas5. In an embodiment, the Class I type I-B CRISPR-Cas system comprising Cas6b, Cas8b (Csh1), Cas7 (Csh2) and/or Cas5 but lacking Cas 3 and/or Cas3″ is catalytically-inactive, i.e., does not possess single-stranded or double-stranded nuclease activity due to the absence of Cas3 and/or Cas3″. A type I-C CRISPR-Cas system may comprise Cas5d, Cas8c (Csd1), and/or Cas7 (Csd2). A type I-D CRISPR-Cas system may comprise Cas10d (Csc3), Csc2, Csc1, and/or Cas6d. A type I-E CRISPR-Cas system may comprise Cse1 (CasA), Cse2 (CasB), Cas7 (CasC), Cas5 (CasD) and/or Cas6e (CasE). A type I-F CRISPR-Cas system may comprise Cys1, Cys2, Cas7 (Cys3) and/or Cas6f (Csy4). An example type I-F CRISPR-Cas system may include a DNA-targeting complex Cascade (also known as Csy complex) which is encoded by three genes: cas6, cas7, and a natural cas8-cas5 fusion (hereafter referred to simply as cas8). The type I-F CRISPR-Cas system may further comprise a native CRISPR array, comprising four repeat and three spacer sequences, encodes distinct mature CRISPR RNAs (crRNAs), which we also refer to as guide RNAs.

[0139] In an embodiment, Class 1 type I CRISPR-Cas systems naturally lacking Cas3 and/or Cas3″ lack single-stranded and/or double-stranded nuclease activity against a target polynucleotide(s). In an embodiment, engineered Class 1 type I CRISPR-Cas systems comprising Cas3 and/or Cas3″ may optionally comprise or lack single-stranded and/or double-stranded nuclease activity against a target polynucleotide(s). For example, Tables 12 and 13 disclose exemplary Class 1 Type I-B and I-B2 CRISPR systems optionally comprising or lacking catalytic activity, i.e., comprising or lacking Cas3 and/or Cas3″.

[0140] Sometimes a hidden component of Type 1 systems, Cas11 participates in genome engineering as part of the cascade target recognition complex. In some instances, the cas11 gene is encoded within cas8. In some instances, the cas11 gene is embedded within cas10. In eukaryote translation, cas8 may not be recognized by the ribosome. Cas11, sometimes implemented with its own EF1α promotor and Kozak sequence for example, may assist in ribosome recruitment and enhance the systems described herein. See e.g., Tan, R.; et al. Cas11 Enables Genome Engineering in Human Cells with Compact CRISPR-Cas3 Systems. Molecular Cell, 2022, 82, 852-867.e5. In an example embodiment, the systems described herein comprises of a Cas11 or a homolog thereof. In example embodiments, the Cas11 is selected from any SEQ ID NO: 1197, 1198, 1199, or 1200. In example embodiments, the Cas11 is selected from Table A.

TABLE A
Example Cas11 sequences

| Expression plasmid name | Sequence |
|---|---|
| IB43_pCMV-HA-NLS-Cas11 | SEQ ID NO: 1197 |
| IB43_pCMV-Cas11-NLS-HA | SEQ ID NO: 1198 |

| ORF name | DNA seq | Protein seq |
|---|---|---|
| IB43_Cas11 | SEQ ID NO: 1199 | SEQ ID NO: 1200 |

[0141] In some examples, a Type I CRISPR-Cas system may comprise one or more: (a) a nucleotide sequence encoding a Cas7 (Csa2) polypeptide, a nucleotide sequence encoding a Cas8a1 (Csx13) polypeptide or a Cas8a2 (Csx9) polypeptide, a nucleotide sequence encoding a Cas5 polypeptide, a nucleotide sequence encoding a Csa5 polypeptide, a nucleotide sequence encoding a Cas6a polypeptide, a nucleotide sequence encoding a Cas3′ polypeptide, and a nucleotide sequence encoding a Cas3″ polypeptide (Type I-A); (b) a nucleotide sequence encoding a Cas6b polypeptide, a nucleotide sequence encoding a Cas8b (Csh1) polypeptide, a nucleotide sequence encoding a Cas7 (Csh2) polypeptide, a nucleotide sequence encoding a Cas5 polypeptide, a nucleotide sequence encoding a Cas3 polypeptide, and a nucleotide sequence encoding a Cas3″ polypeptide (Type I-B); (c) a nucleotide sequence encoding a Cas5d polypeptide, a nucleotide sequence encoding a Cas8c (Csd1) polypeptide, a nucleotide sequence encoding a Cas7 (Csd2) polypeptide and a nucleotide sequence encoding a Cas3 polypeptide (Type I-C); (d) a nucleotide sequence encoding a Cas10d (Csc3) polypeptide, a nucleotide sequence encoding a Csc2 polypeptide, a nucleotide sequence encoding a Csc1 polypeptide, a nucleotide sequence encoding a Cas6d polypeptide, and a nucleotide sequence encoding a Cas3 polypeptide (Type I-D); (e) a nucleotide sequence encoding a Cse1 (CasA) polypeptide, a nucleotide sequence encoding a Cse2 (CasB) polypeptide, a nucleotide sequence encoding a Cas7 (CasC) polypeptide, a nucleotide sequence encoding a Cas5 (CasD) polypeptide, a nucleotide sequence encoding a Cas6e (CasE) polypeptide, and a nucleotide sequence encoding a Cas3 polypeptide (Type I-E); and/or (f) a nucleotide sequence encoding a Cys1 polypeptide, a nucleotide sequence encoding a Cys2 polypeptide, a nucleotide sequence encoding a Cas7 (Cys3) polypeptide and a nucleotide sequence encoding a Cas6f polypeptide, and a nucleotide sequence encoding a Cas3 polypeptide (Type I-F). Accordingly, a type I Cas protein may be one or more of the Cas proteins described herein.

[0142] In an embodiment, the system comprises one or more Type I-B Cas proteins. The one or more Type I-B Cas proteins may comprise Cas6b. The one or more Type I-B Cas proteins may comprise Cas8b, e.g., Cas8b1, Cas8b2, and Cas8b3. In some examples, the one or more Type I-B Cas proteins comprises Cas8b3. In some examples, the Type 1-B Cas protein may be one or more of Cas5, Cas6, Cas7, and Cas8. In some examples, the system comprises Cas 5. In some examples, the system comprises Cas 6. In some examples, the system comprises Cas 7. In some examples, the system comprises Cas 5 and Cas6. In some examples, the system comprises Cas 5 and Cas7. In some examples, the system comprises Cas 5 and Cas 8. In some examples, the system comprises Cas 6 and Cas 7. In some examples, the system comprises Cas 6 and Cas 8. In some examples, the system comprises Cas 7 and Cas 8. In some examples, the system comprises Cas 5, Cas6, and Cas7. In some examples, the system comprises Cas 5, Cas6, and Cas8. In some examples, the system comprises Cas 5, Cas7 and Cas8. In some examples, the system comprises Cas 6, Cas7, and Cas8. In some examples, the system comprises Cas 5, Cas6, Cas7, and Cas8.

[0143] In some examples, the system comprises a polynucleotide encoding Cas5. In some examples, the system comprises a polynucleotide encoding Cas6. In some examples, the system comprises a polynucleotide encoding Cas7. In some examples, the system comprises a polynucleotide encoding Cas 5 and a polynucleotide encoding Cas6. In some examples, the system comprises a polynucleotide encoding Cas5 and a polynucleotide encoding Cas7. In some examples, the system comprises a polynucleotide encoding Cas 5 and a polynucleotide encoding Cas8. In some examples, the system comprises a polynucleotide encoding Cas6 and a polynucleotide encoding Cas7. In some examples, the system comprises a polynucleotide encoding Cas6 and a polynucleotide encoding Cas8. In some examples, the system comprises a polynucleotide encoding Cas7 and a polynucleotide encoding Cas 8. In some examples, the system comprises a polynucleotide encoding Cas 5, a polynucleotide encoding Cas6, and a polynucleotide encoding Cas7. In some examples, the system comprises a polynucleotide encoding Cas 5, a polynucleotide encoding Cas6, and a polynucleotide encoding Cas8. In some examples, the system comprises a polynucleotide encoding Cas 5, a polynucleotide encoding Cas7 and a polynucleotide encoding Cas8. In some examples, the system comprises a polynucleotide encoding Cas6, a polynucleotide encoding Cas7, and a polynucleotide encoding Cas8. In some examples, the system comprises a polynucleotide encoding Cas 5, a polynucleotide encoding Cas6, a polynucleotide encoding Cas7, and a polynucleotide encoding Cas8. The Cas proteins herein (e.g., Cas5, Cas6, Cas7, Cas 8) includes the wild type transposases, variants thereof, and functional fragments thereof. In some examples, the system comprises a first polynucleotide encoding a first Cas6 and a second polynucleotide encoding a second Cas6.

[0144] Examples of type I CRISPR components include those described in Makarova et al., Annotation and Classification of CRISPR-Cas Systems, Methods Mol Biol. 2015; 1311:47-75. Makarova et al. ascribe Cas3 and Cas3″ as providing the single-stranded and double-stranded nuclease and helicase functions of type I CRISPR-Cas components.

[0145] In some examples, the Cas protein may be nuclease-deficient. A nuclease-deficient nuclease may have no nuclease activity. A nuclease-deficient nuclease may have nickase activity.

[0146] In some cases, the Cas protein may be orthologues or homologues of the above mentioned Cas proteins. The terms “ortholog” and “homolog” are well known in the art. By means of further guidance, a “homolog” of a protein as used herein is a protein of the same species which performs the same or a similar function as the protein it is a homologue of. Homologous proteins may but need not be structurally related, or are only partially structurally related. An “ortholog” of a protein as used herein is a protein of a different species which performs the same or a similar function as the protein it is an orthologue of. Orthologous proteins may but need not be structurally related, or are only partially structurally related.

[0147] In some examples, the one or more CRISPR-associated Tn7 transposase polypeptides and/or the one or more Type I-B Cas proteins are from or originated from Anabaena variabilis.

[0148] In an example embodiment, each of the one or more Tn7 transposase polypeptides are independently derived form a same or different species. In an example embodiment, Cas6, Cas7, Cas8, TniQ, TnsAB, TnsC are from IB43, and Cas5 is from a different species. In an example embodiment, Cas5, Cas7, Cas8, TniQ, TnsAB, TnsC are from IB43, and Cas6 is from a different species. In an example embodiment, Cas5, Cas6, Cas8, TniQ, TnsAB, TnsC are from IB43, and Cas7 is from a different species. In an example embodiment, Cas5, Cas6, Cas7, TniQ, TnsAB, TnsC are from IB43, and Cas8 is from a different species. In an example embodiment, Cas5 Cas6, Cas7, Cas8, TnsAB, and TnsC are from IB43, and TniQ is from a different species. In an example embodiment, Cas5, Cas6, Cas7, Cas8, TniQ, and TnsC are from IB43, and TnsAB is from a different species. In an example embodiment, Cas5, Cas6, Cas7, Cas8, TniQ, and TsnABC are from IB43, and TnsC is from a different species. In an example embodiment, the IB species is selected from IB3, IB4, IB7, IB16, IB20, IB21, IB25, IB27, IB32, IB34, IB36, IB42, IB43, IB45, IB46, IB47, IB48, and IB49. In an embodiment, Cas 5 is from IB45, Cas6 and Cas7 are from IB48, Cas8 is from IB46, TnsAB is from IB43, TnsC is from IB25 and TniQ is from IB36. In an embodiment, ortholog specific TnsC sequence is utilized to recruit specific TnsAB.

[0149] With regard to Type IB CAST systems, reference is made to U.S. Provisional Application Nos. 62/929,621; 62/964,010; 62/980,897; 63/046,470; 63/104,442; and International Patent Application No. PCT/US2020/058405; and U.S. Provisional Application No. 63/132,144, filed Dec. 30, 2020 and International Patent Application No. PCT/US2021/065783. The entire contents of the above-identified applications are hereby fully incorporated herein by reference.

[0150] In some cases, the Cas protein lacks nuclease activity. Such Cas protein may be a naturally existing Cas protein that does not have nuclease activity or the Cas protein may be an engineered Cas protein with mutations or truncations that reduce or eliminate nuclease activity.

[0151] In an embodiment, the present disclosure includes a transgenic cell in which one or more nucleic acids encoding one or more guide RNAs are provided or introduced operably connected in the cell with a regulatory element comprising a promoter of one or more gene of interest. As used herein, the term “Cas transgenic cell” refers to a cell, such as a eukaryotic cell, in which a Cas gene has been genomically integrated. The nature, type, or origin of the cell are not particularly limiting according to the present invention. Also, the way the Cas transgene is introduced in the cell may vary and can be any method as is known in the art. In an embodiment, the Cas transgenic cell is obtained by introducing the Cas transgene in an isolated cell. In certain other embodiments, the Cas transgenic cell is obtained by isolating cells from a Cas transgenic organism. By means of example, and without limitation, the Cas transgenic cell as referred to herein may be derived from a Cas transgenic eukaryote, such as a Cas knock-in eukaryote. Reference is made to International Patent Publication No. WO 2014/093622 (PCT/US13/74667), incorporated herein by reference. Methods of US Patent Publication Nos. 20120017290 and 20110265198 assigned to Sangamo BioSciences, Inc. directed to targeting the Rosa locus may be modified to utilize the CRISPR Cas system of the present invention. Methods of US Patent Publication No. 20130236946 assigned to Cellectis directed to targeting the Rosa locus may also be modified to utilize the CRISPR Cas system of the present invention. By means of further example reference is made to Platt et. al. (Cell; 159(2):440-455 (2014)), describing a Cas9 knock-in mouse, which is incorporated herein by reference. The Cas transgene can further comprise a Lox-Stop-polyA-Lox (LSL) cassette thereby rendering Cas expression inducible by Cre recombinase. Alternatively, the Cas transgenic cell may be obtained by introducing the Cas transgene in an isolated cell. Delivery systems for transgenes are well known in the art. By means of example, the Cas transgene may be delivered in for instance eukaryotic cell by means of vector (e.g., AAV, adenovirus, lentivirus) and/or particle and/or nanoparticle delivery, as also described herein elsewhere.

[0152] It will be understood by the skilled person that the cell, such as the Cas transgenic cell, as referred to herein may comprise further genomic alterations besides having an integrated Cas gene or the mutations arising from the sequence specific action of Cas when complexed with RNA capable of guiding Cas to a target locus.

[0153] The guide RNA(s) encoding sequences and/or Cas encoding sequences can be functionally or operatively linked to regulatory element(s) and hence the regulatory element(s) drive expression. The promoter(s) can be constitutive promoter(s) and/or conditional promoter(s) and/or inducible promoter(s) and/or tissue specific promoter(s). The promoter can be selected from the group consisting of RNA polymerases, pol I, pol II, pol III, T7, U6, H1, retroviral Rous sarcoma virus (RSV) LTR promoter, the cytomegalovirus (CMV) promoter, the SV40 promoter, the dihydrofolate reductase promoter, the β-actin promoter, the phosphoglycerol kinase (PGK) promoter, and the EF1α promoter. An advantageous promoter is the promoter is U6.

### ClpX

[0154] A regulator of protein denaturing and degradation, ClpX is an ATPase belonging to the AAA+ superfamily. ClpX translocates unfolded proteins through a central hexameric pore. ClpX may also recognize degron tags under certain conditions. For example, ClpX recognizes a specific C-terminal motif on a MuA transposase pushing the post-transposition complex into a conformational rearrangement thereby allowing more efficient binding of ClpX to the newly exposed residues. Thus, the ClpX achieves targeted unfolding and destabilization of the MuA post-transposition complex. Accordingly, ClpX may be used as an accessory protein to enhance the to the systems described herein. See e.g., Lampe, G. D.; et al. Targeted DNA Integration in Human Cells without Double-Strand Breaks Using CRISPR RNA-Guided Transposases, 2023. In example embodiments, the systems described herein may comprise of a ClpX. In example embodiments, the ClpX is selected from any SEQ ID NO: 1201, 1202, 1203, or 1204. In example embodiments, the ClpX is selected from Table B. In example embodiments, the Clpx sequence is the sequence reported at GEO accession GSE223174.

TABLE B
Example ClpX sequences.

| Expression plasmid name | Sequence |
|---|---|
| pCMV-HA-NLS-EcClpX | SEQ ID NO: 1201 |
| pCMV-EcClpX-NLS-HA | SEQ ID NO: 1202 |

| ORF name | DNA seq | Protein seq |
|---|---|---|
| EcClpX | SEQ ID NO: 1203 | SEQ ID NO: 1204 |

[0155] Additional sequences can be found in the National Center for Biotechnology Information Sequence Read Archive under GEO accession GSE223174.

### Guide Molecules

[0156] In an embodiment, systems described herein comprises one or more guide molecules. Guide molecules comprise a guide sequence and a scaffold. The guide sequence is an engineered sequence designed to change the target sequence recognized by the system to a target sequence other than a sequence defined by the protospacer of a naturally occurring crRNA.

[0157] In an embodiment the system includes two guide molecules that can each be splint or bridge molecules. In an embodiment, the first and second guide molecules comprise a region capable of hybridizing to a cleaved strand of the target polynucleotide and a region capable of hybridizing to the donor sequence. In an embodiment, the composition comprises a splint oligonucleotide that has a region capable of hybridizing to a cleaved strand of the target polynucleotide and a region capable of hybridizing to the donor molecule.

[0158] The ability of a guide molecule to direct sequence-specific binding of the CRISPR-Cas complex to a target nucleic acid sequence may be assessed by any suitable assay. For example, the components of a CRISPR-complex may be provided to a host cell having the corresponding target nucleic acid sequence, such as by transfection with vectors encoding the components of the nucleic acid-targeting complex, followed by an assessment of preferential targeting (e.g., cleavage) within the target nucleic acid sequence, such as by Surveyor assay (Qui et al. 2004. BioTechniques. 36(4)702-707). Similarly, cleavage of a target nucleic acid sequence may be evaluated in a test tube by providing the target nucleic acid sequence, components of the CRISPR-Cas complex, including the guide sequence to be tested and a control guide sequence different from the test guide sequence, and comparing binding or rate of cleavage at the target sequence between the test and control guide sequence reactions. Other assays are possible and will occur to those skilled in the art.

[0159] In an embodiment, the guide molecule is an RNA. The guide molecule(s) are included in the CRISPR-Cas has sufficient complementarity with a target nucleic acid sequence to hybridize with the target nucleic acid sequence and direct sequence-specific binding of a nucleic acid-targeting complex to the target nucleic acid sequence. The degree of complementarity, when optimally aligned using a suitable alignment algorithm, can be about or more than about 50%, 60%, 75%, 80%, 85%, 90%, 95%, 97.5%, 99%, or more. Optimal alignment may be determined with the use of any suitable algorithm for aligning sequences, non-limiting examples of which include the Smith-Waterman algorithm, the Needleman-Wunsch algorithm, algorithms based on the Burrows-Wheeler Transform (e.g., the Burrows Wheeler Aligner), Clustal W, Clustal X, BLAT, Novoalign (Novocraft Technologies; available at www.novocraft.com), ELAND (Illumina, San Diego, CA), SOAP (available at soap.genomics.org.cn), and Maq (available at maq.sourceforge.net).

[0160] A guide sequence, may be selected to target any target nucleic acid sequence in a target polynucleotide. In one embodiment, the target polynucleotide may be DNA. In one embodiment, the target polynucleotide is a RNA polynucleotide. The target sequence may be a sequence within an RNA molecule selected from the group consisting of messenger RNA (mRNA), pre-mRNA, ribosomal RNA (rRNA), transfer RNA (tRNA), micro-RNA (miRNA), small interfering RNA (siRNA), small nuclear RNA (snRNA), small nucleolar RNA (snoRNA), double stranded RNA (dsRNA), non-coding RNA (ncRNA), long non-coding RNA (lncRNA), and small cytoplasmatic RNA (scRNA). In one embodiment, the target sequence may be a sequence within an RNA molecule selected from the group consisting of mRNA, pre-mRNA, and rRNA. In one embodiment, the target sequence may be a sequence within an RNA molecule selected from the group consisting of ncRNA, and lncRNA. In one example embodiment, the target sequence may be a sequence within an mRNA molecule or a pre-mRNA molecule.

[0161] In one embodiment, the scaffold is located 5′ of the guide sequence. In one embodiment, the scaffold is located 3′ of the guide sequence. The direct repeat may comprise one or more modifications. The modifications may remove unnecessary secondary structure or otherwise minimize the overall size of the scaffold component of the guide molecule. The direct repeat may have one or more modifications that increase the stability of the guide molecule, enhance complex formation with the Cas polypeptides described herein, for example by modulating nuclease activity (either by increasing or decreasing), and/or reducing off-target effects.

[0162] In an embodiment, the guide sequence length of the guide molecule is from 15 to 35 nt. In an embodiment, the guide sequence length of the guide molecule is at least 15 nucleotides. In an embodiment, the guide sequence length is from 15 to 17 nt, e.g., 15, 16, or 17 nt, from 17 to 20 nt, e.g., 17, 18, 19, or 20 nt, from 20 to 24 nt, e.g., 20, 21, 22, 23, or 24 nt, from 23 to 25 nt, e.g., 23, 24, or 25 nt, from 24 to 27 nt, e.g., 24, 25, 26, or 27 nt, from 27 to 30 nt, e.g., 27, 28, 29, or 30 nt, from 30 to 35 nt, e.g., 30, 31, 32, 33, 34, or 35 nt, or 35 nt or longer.

[0163] In an embodiment, the degree of complementarity between a guide sequence and its corresponding target sequence can be about or more than about 50%, 60%, 75%, 80%, 85%, 90%, 95%, 97.5%, 99%, or 100%; a guide sequence can be about or more than about 5, 10, 11, 12, 13, 14, 15, 16, 17, 18, 19, 20, 21, 22, 23, 24, 25, 26, 27, 28, 29, 30, 35, 40, 45, 50, 75, or more nucleotides in length; or guide sequence can be less than about 75, 50, 45, 40, 35, 30, 25, 20, 15, 12, or fewer nucleotides in length. In an embodiment, the degree of complementarity between a guide sequence and its corresponding target sequence is greater than 94.5% or 95% or 95.5% or 96% or 96.5% or 97% or 97.5% or 98% or 98.5% or 99% or 99.5% or 99.9%, or 100%. Off target is less than 100% or 99.9% or 99.5% or 99% or 99% or 98.5% or 98% or 97.5% or 97% or 96.5% or 96% or 95.5% or 95% or 94.5% or 94% or 93% or 92% or 91% or 90% or 89% or 88% or 87% or 86% or 85% or 84% or 83% or 82% or 81% or 80% complementarity between the target sequence and the guide sequence, with it being advantageous that off target is 100% or 99.9% or 99.5% or 99% or 99% or 98.5% or 98% or 97.5% or 97% or 96.5% or 96% or 95.5% or 95% or 94.5% complementarity between the target sequence and the guide sequence.

### Guide Molecule Modifications

[0164] Many modifications to guide molecules are known in the art and are further contemplated within the context of this invention. Various modifications may be used to increase the specificity of binding to the target sequence and/or increase the activity of the Cas protein and/or reduce off-target effects. Example guide molecule modifications are described in International Patent Application No. PCT US2019/045582, specifically paragraphs [0178]-[0333], which is incorporated herein by reference as if expressed in its entirety herein. Additional guide molecule modifications are described in detail below.

[0165] The guide molecule may be designed to reduce the degree secondary structure within the guide molecule. In an embodiment, about or less than about 75%, 50%, 40%, 30%, 25%, 20%, 15%, 10%, 5%, 1%, or fewer of the nucleotides of the guide molecule participate in self-complementary base pairing when optimally folded. Optimal folding may be determined by any suitable polynucleotide folding algorithm. Some programs are based on calculating the minimal Gibbs free energy. An example of one such algorithm is mFold, as described by Zuker and Stiegler (Nucleic Acids Res. 9 (1981), 133-148). Another example folding algorithm is the online webserver RNAfold, developed at Institute for Theoretical Chemistry at the University of Vienna, using the centroid structure prediction algorithm (see e.g., A. R. Gruber et al., 2008, Cell 106(1): 23-24; and PA Carr and GM Church, 2009, Nature Biotechnology 27(12):1151-62).

[0166] The guide molecule is configured to minimize or reduce off-target effects. Guide sequences and strategies to minimize toxicity and off-target effects can be as in WO 2014/093622 (PCT/US2013/074667); or, via mutation as described herein.

### Non-Naturally Occurring Nucleic Acids

[0167] In an embodiment, guide molecules of the invention comprise non-naturally occurring nucleic acids and/or non-naturally occurring nucleotides and/or nucleotide analogs, and/or chemical modifications. Non-naturally occurring nucleic acids can include, for example, mixtures of naturally and non-naturally occurring nucleotides. Non-naturally occurring nucleotides and/or nucleotide analogs may be modified at the ribose, phosphate, and/or base moiety. In an embodiment of the invention, a guide nucleic acid comprises ribonucleotides and non-ribonucleotides. In one such embodiment, a guide comprises one or more ribonucleotides and one or more deoxyribonucleotides. In an embodiment of the invention, the guide comprises one or more non-naturally occurring nucleotide or nucleotide analog such as a nucleotide with phosphorothioate linkage, boranophosphate linkage, a locked nucleic acid (LNA) nucleotides comprising a methylene bridge between the 2′ and 4′ carbons of the ribose ring, or bridged nucleic acids (BNA). Other examples of modified nucleotides include 2′-O-methyl analogs, 2′-deoxy analogs, 2-thiouridine analogs, N6-methyladenosine analogs, or 2′-fluoro analogs. Further examples of modified bases include, but are not limited to, 2-aminopurine, 5-bromo-uridine, pseudouridine (Ψ), N1-methylpseudouridine (me1Ψ), 5-methoxyuridine (5moU), inosine, 7-methylguanosine. Examples of guide RNA chemical modifications include, without limitation, incorporation of 2′-O-methyl (M), 2′-O-methyl-3′-phosphorothioate (MS), phosphorothioate (PS), S-constrained ethyl (cEt), or 2′-O-methyl-3′-thioPACE (MSP) at one or more terminal nucleotides. Such chemically modified guides can comprise increased stability and increased activity as compared to unmodified guide molecules, though on-target vs. off-target specificity is not predictable. (See, Hendel, 2015, Nat Biotechnol. 33(9):985-9, doi: 10.1038/nbt.3290, published online 29 Jun. 2015; Ragdarm et al., 0215, PNAS, E7110-E7111; Allerson et al., J. Med. Chem. 2005, 48:901-904; Bramsen et al., Front. Genet., 2012, 3:154; Deng et al., PNAS, 2015, 112:11870-11875; Sharma et al., MedChemComm., 2014, 5:1454-1471; Hendel et al., Nat. Biotechnol. (2015) 33(9): 985-989; Li et al., Nature Biomedical Engineering, 2017, 1, 0066 DOI: 10.1038/s41551-017-0066).

### 5′ and 3′ Modifications

[0168] In an embodiment, the 5′ and/or 3′ end of a guide molecule is modified by a variety of functional moieties including fluorescent dyes, polyethylene glycol, cholesterol, proteins, or detection tags. (See Kelly et al., 2016, J. Biotech. 233:74-83). In an embodiment of the invention, deoxyribonucleotides and/or nucleotide analogs are incorporated in engineered guide structures, such as, without limitation, 5′ and/or 3′ end, stem-loop regions, and the seed region. In an embodiment, the modification is not in the 5′-handle of the stem-loop regions. Chemical modification in the 5′-handle of the stem-loop region of a guide may abolish its function (see Li, et al., Nature Biomedical Engineering, 2017, 1:0066). In an embodiment, at least 1, 2, 3, 4, 5, 6, 7, 8, 9, 10, 11, 12, 13, 14, 15, 16, 17, 18, 19, 20, 21, 22, 23, 24, 25, 26, 27, 28, 29, 30, 35, 40, 45, 50, or 75 nucleotides of a guide is chemically modified. In an embodiment, 3-5 nucleotides at either the 3′ or the 5′ end of a guide are chemically modified. In an embodiment, only minor modifications are introduced in the seed region, such as 2′-F modifications. In an embodiment, 2′-F modification is introduced at the 3′ end of a guide. In an embodiment, three to five nucleotides at the 5′ and/or the 3′ end of the guide are chemically modified with 2′-O-methyl (M), 2′-O-methyl-3′-phosphorothioate (MS), S-constrained ethyl (cEt), or 2′-O-methyl-3′-thioPACE (MSP). Such modification can enhance genome editing efficiency (see Hendel et al., Nat. Biotechnol. (2015) 33(9): 985-989). In an embodiment, all of the phosphodiester bonds of a guide are substituted with phosphorothioates (PS) for enhancing levels of gene disruption. In an embodiment, more than five nucleotides at the 5′ and/or the 3′ end of the guide are chemically modified with 2′-O-Me, 2′-F or S-constrained ethyl (cEt). Such chemically modified guides can mediate enhanced levels of gene disruption (see Rahdar et al., 2015, PNAS, E7110-E7111). In an embodiment of the invention, a guide is modified to comprise a chemical moiety at its 3′ and/or 5′ end. Such moieties include, but are not limited to amine, azide, alkyne, thio, dibenzocyclooctyne (DBCO), or Rhodamine. In an embodiment, the chemical moiety is conjugated to the guide by a linker, such as an alkyl chain. In an embodiment, the chemical moiety of the modified guide can be used to attach the guide to another molecule, such as DNA, RNA, protein, or nanoparticles. Such chemically modified guides can be used to identify or enrich cells genetically edited by a CRISPR system (see Lee et al., eLife, 2017, 6:e25312, DOI: 10.7554).

[0169] In an embodiment, the loop of the 5′-handle of the guide molecule is modified. In an embodiment, the loop of the 5′-handle of the guide molecule is modified to have a deletion, an insertion, a split, or chemical modifications. In an embodiment, the loop comprises 3, 4, or 5 nucleotides. In an embodiment, the loop comprises the sequence of UCUU, UUUU, UAUU, or UGUU.

### Mixed RNA-DNA Guide Molecules

[0170] In one embodiment, the guide sequence comprises a mixture of RNA and DNA. The partial replacement of RNA nucleotides with DNA nucleotides has been shown to enhance CRISPR-Cas specificity by reducing off-target effects. See Rueda et al., Nat Commun 8, 1610 (2017), DOI: 10.1038/s41467-017-01732-9; Kartje et al., Biochemistry 2018, 57, 21, 3027-3031, DOI: 10.1021/acs.biochem.8b00107; and Yin et al., Nat Chem Biol. 2018 March; 14(3): 311-316, DOI: 10.1038/nchembio.2559.

### Truncated Guide Molecules

[0171] In particular embodiments, use is made of a truncated guide (tru-guide), i.e. a guide molecule which comprises a guide sequence which is truncated in length with respect to the canonical guide sequence length. As described by Nowak et al. (Nucleic Acids Res (2016) 44 (20): 9555-9564), such guides may allow catalytically active CRISPR-Cas enzyme to bind its target without cleaving the target RNA. In particular embodiments, a truncated guide is used which allows the binding of the target but retains only nickase activity of the CRISPR-Cas enzyme.

### Functionalized Guide Molecules

[0172] In an embodiment, different portions of the guide molecule (e.g. the guide sequence and the spacer) may be covalently linked via a linker (e.g., a non-nucleotide loop) that comprises a moiety such as spacers, attachments, bioconjugates, chromophores, reporter groups, dye labeled RNAs, and non-naturally occurring nucleotide analogues. More specifically, suitable linkers for purposes of this invention include, but are not limited to, polyethers (e.g., polyethylene glycols, polyalcohols, polypropylene glycol or mixtures of efhylene and propylene glycols), polyamines group (e.g., spennine, spermidine and polymeric derivatives thereof), polyesters (e.g., poly(ethyl acrylate)), polyphosphodiesters, alkylenes, and combinations thereof. Suitable attachments include any moiety that can be added to the linker to add additional properties to the linker, such as but not limited to, fluorescent labels. Suitable bioconjugates include, but are not limited to, peptides, glycosides, lipids, cholesterol, phospholipids, diacyl glycerols and dialkyl glycerols, fatty acids, hydrocarbons, enzyme substrates, steroids, biotin, digoxigenin, carbohydrates, polysaccharides. Suitable chromophores, reporter groups, and dye-labeled RNAs include, but are not limited to, fluorescent dyes such as fluorescein and rhodamine, chemiluminescent, electrochemiluminescent, and bioluminescent marker compounds. The design of example linkers conjugating two RNA components are also described in WO 2004/015075.

[0173] The linker (e.g., a non-nucleotide loop) can be of any length. In an embodiment, the linker has a length equivalent to about 0-16 nucleotides. In an embodiment, the linker has a length equivalent to about 0-8 nucleotides. In an embodiment, the linker has a length equivalent to about 0-4 nucleotides. In an embodiment, the linker has a length equivalent to about 2 nucleotides. Example linker design is also described in WO2011/008730.

[0174] In one aspect, the guide molecule comprises portions that are chemically linked or conjugated via a non-phosphodiester bond. In one aspect, the guide molecule comprises, in non-limiting examples, direct repeat sequence portion and a targeting sequence portion that are chemically linked or conjugated via a non-nucleotide loop. In an embodiment, the portions are joined via a non-phosphodiester covalent linker. Examples of the covalent linker include but are not limited to a chemical moiety selected from the group consisting of carbamates, ethers, esters, amides, imines, amidines, aminotrizines, hydrozone, disulfides, thioethers, thioesters, phosphorothioates, phosphorodithioates, sulfonamides, sulfonates, fulfones, sulfoxides, ureas, thioureas, hydrazide, oxime, triazole, photolabile linkages, C—C bond forming groups such as Diels-Alder cyclo-addition pairs or ring-closing metathesis pairs, and Michael reaction pairs.

[0175] In an embodiment, portions of the guide molecule are first synthesized using the standard phosphoramidite synthetic protocol (Herdewijn, P., ed., Methods in Molecular Biology Col 288, Oligonucleotide Synthesis: Methods and Applications, Humana Press, New Jersey (2012)). In an embodiment, the non-targeting guide portions can be functionalized to contain an appropriate functional group for ligation using the standard protocol known in the art (Hermanson, G. T., Bioconjugate Techniques, Academic Press (2013)). Examples of functional groups include, but are not limited to, hydroxyl, amine, carboxylic acid, carboxylic acid halide, carboxylic acid active ester, aldehyde, carbonyl, chlorocarbonyl, imidazolylcarbonyl, hydrozide, semicarbazide, thio semicarbazide, thiol, maleimide, haloalkyl, sufonyl, ally, propargyl, diene, alkyne, and azide. Once a non-targeting portion of a guide is functionalized, a covalent chemical bond or linkage can be formed between the two oligonucleotides. Examples of chemical bonds include, but are not limited to, those based on carbamates, ethers, esters, amides, imines, amidines, aminotrizines, hydrozone, disulfides, thioethers, thioesters, phosphorothioates, phosphorodithioates, sulfonamides, sulfonates, fulfones, sulfoxides, ureas, thioureas, hydrazide, oxime, triazole, photolabile linkages, C—C bond forming groups such as Diels-Alder cyclo-addition pairs or ring-closing metathesis pairs, and Michael reaction pairs.

[0176] In an embodiment, one or more portions of a guide molecule can be chemically synthesized. In an embodiment, the chemical synthesis uses automated, solid-phase oligonucleotide synthesis machines with 2′-acetoxyethyl orthoester (2′-ACE) (Scaringe et al., J. Am. Chem. Soc. (1998) 120:11820-11821; Scaringe, Methods Enzymol. (2000) 317:3-18) or 2′-thionocarbamate (2′-TC) chemistry (Dellinger et al., J. Am. Chem. Soc. (2011) 133:11540-11546; Hendel et al., Nat. Biotechnol. (2015) 33:985-989).

[0177] In an embodiment, portion of the guide molecule may be covalently linked using various bioconjugation reactions, loops, bridges, and non-nucleotide links via modifications of sugar, internucleotide phosphodiester bonds, purine and pyrimidine residues. Sletten et al., Angew. Chem. Int. Ed. (2009) 48:6974-6998; Manoharan, M. Curr. Opin. Chem. Biol. (2004) 8:570-9; Behlke et al., Oligonucleotides (2008) 18:305-19; Watts, et al., Drug. Discov. Today (2008) 13:842-55; Shukla, et al., ChemMedChem (2010) 5:328-49.

[0178] In one embodiment, portions of the guide molecule may be covalently linked using click chemistry. In one embodiment, portions of the guide molecule may be covalently linked using a triazole linker. In one embodiment, portion of the guide molecule may be covalently linked using Huisgen 1,3-dipolar cycloaddition reaction involving an alkyne and azide to yield a highly stable triazole linker (He et al., ChemBioChem (2015) 17:1809-1812; WO 2016/186745). In one embodiment, portions of the guide molecule may covalently linked by ligating a 5′-hexyne portion and a 3′-azide portion. In one embodiment, either or both of the 5′-hexyne and 3′-azide portion of the guide molecule may be protected with 2′-acetoxyethl orthoester (2′-ACE) group, which can be subsequently removed using Dharmacon protocol (Scaringe et al., J. Am. Chem. Soc. (1998) 120:11820-11821; Scaringe, Methods Enzymol. (2000) 317:3-18).

[0179] In one embodiment, the guide molecule is designed or selected to modulate intermolecular interactions among guide molecules, such as among stem-loop regions of different guide molecules. It will be appreciated that nucleotides within a guide molecule that base-pair to form a stem-loop are also capable of base-pairing to form an intermolecular duplex with a second guide molecule and that such an intermolecular duplex would not have a secondary structure compatible with CRISPR complex formation. Accordingly, is useful to select or design scaffold sequences in order to modulate stem-loop formation and CRISPR complex formation. In an embodiment, about or less than about 75%, 50%, 40%, 30%, 25%, 20%, 15%, 10%, 5%, 1%, or fewer of guide molecule are in intermolecular duplexes. It will be appreciated that stem-loop variation will often be within limits imposed by scaffold-Cas effector interactions. One way to modulate stem-loop formation or change the equilibrium between stem-loop and intermolecular duplex is to vary nucleotide pairs in the stem of the stem-loop of a scaffold. For example, in one embodiment, a G-C pair is replaced by an A-U or U-A pair. In another embodiment, an A-U pair is substituted for a G-C or a C-G pair. In another embodiment, a naturally occurring nucleotide is replaced by a nucleotide analog. Another way to modulate stem-loop formation or change the equilibrium between stem-loop and intermolecular duplex is to modify the loop of the stem-loop of a scaffold. Without being bound by theory, the loop can be viewed as an intervening sequence flanked by two sequences that are complementary to each other. When that intervening sequence is not self-complementary, its effect will be to destabilize intermolecular duplex formation. The same principle applies when guide molecules are multiplexed: while the targeting sequences may differ, it may be advantageous to modify the stem-loop region in the scaffold of the different guide molecules. Moreover, when guide molecules are multiplexed, the relative activities of the different guide molecules may be modulated by balancing the activity of each individual guide molecule. In an embodiment, the equilibrium between intermolecular stem-loops vs. intermolecular duplexes is determined. The determination may be made by physical or biochemical means and can be in the presence or absence of a CRISPR effector.

### Dead Guide Sequences

[0180] In one aspect, the invention provides guide molecules which are modified in a manner which allows for formation of the CRISPR Cas complex and successful binding to the target, while at the same time, not either allowing for or not allowing for successful nuclease activity (i.e., without nuclease activity/without indel activity). Such modified guide molecules are referred to as “dead guides” or “dead guide molecules”. These dead guide molecules can be thought of as catalytically inactive or conformationally inactive with regard to nuclease activity. Indeed, dead guide molecules may not sufficiently engage in productive base pairing with respect to the ability to promote catalytic activity or to distinguish on-target and off-target binding activity. Briefly, the assay involves synthesizing a CRISPR target RNA and guide molecules comprising mismatches with the target RNA, combining these with the enzyme and analyzing cleavage based on gels based on the presence of bands generated by cleavage products, and quantifying cleavage based upon relative band intensities.

[0181] Hence, in a related aspect, the invention provides a non-naturally occurring or engineered CRISPR-Cas system comprising a functional multimeric Cas enzyme as described herein, and guide molecule, e.g., a guide molecule wherein the guide molecules comprises a dead guide sequence whereby the guide molecule is capable of hybridizing to a target sequence such that the CRISPR-Cas system is directed to a genomic locus of interest in a cell without detectable cleavage activity of a non-mutant enzyme of the system. It is to be understood that any of the guide molecules according to the invention as described herein elsewhere may be used as dead guide molecules comprising a dead guide sequence.

[0182] The ability of a dead guide molecules to direct sequence-specific binding of a CRISPR complex to a target sequence may be assessed by any suitable assay. For example, the components of a CRISPR-Cas system sufficient to form a CRISPR-Cas complex, including the dead guide molecule to be tested, may be provided to a host cell having the corresponding target sequence, such as by transfection with vectors encoding the components of the system, followed by an assessment of preferential cleavage within the target sequence.

[0183] As explained further herein, several structural parameters allow for a proper framework to arrive at such dead guide molecules. Dead guide molecule sequences can be typically shorter than respective “active” guide molecules which result in active cleavage. In particular embodiments, dead guide molecules are 5%, 10%, 20%, 30%, 40%, 50%, shorter than respective active guide molecules directed to the same target sequence.

[0184] As explained below and known in the art, one aspect of guide molecules specificity is the scaffold sequence, which is to be appropriately linked to guide sequences. In particular, this implies that the scaffold sequences are designed dependent on the origin of the enzyme. Structural data available for validated dead guide molecules may be used for designing CRISPR-Cas specific equivalents. Structural similarity between, e.g., the orthologous nuclease domains of two or more CRISPR-Cas proteins may be used to transfer design equivalent dead guide molecules. Thus, the dead guide molecule herein may be appropriately modified in length and sequence to reflect such CRISPR-Cas specific equivalents, allowing for formation of the CRISPR-Cas complex and successful binding to the target sequence, while at the same time, not allowing for successful nuclease activity.

[0185] Dead guide molecules allow one to use guide molecules as a means for gene targeting, without the consequence of nuclease activity, while at the same time providing directed means for activation or repression. Dead guide molecule may be modified to further include elements in a manner which allow for activation or repression of gene activity, in particular protein adaptors (e.g., aptamers) as described herein elsewhere allowing for functional placement of gene effectors (e.g., activators or repressors of gene activity). One example is the incorporation of aptamers, as explained herein and in the state of the art. By engineering the dead guide molecule to incorporate protein-interacting aptamers (Konermann et al., “Genome-scale transcription activation by an engineered CRISPR-Cas9 complex,” doi: 10.1038/nature 14136, incorporated herein by reference), one may assemble multiple distinct effector domains. Such may be modeled after natural processes.

[0186] In the practice of the invention, loops of the guide molecule may be extended, without colliding with the Cas protein by the insertion of distinct RNA loop(s) or distinct sequence(s) that may recruit adaptor proteins that can bind to the distinct RNA loop(s) or distinct sequence(s). The adaptor proteins may include but are not limited to orthogonal RNA-binding protein/aptamer combinations that exist within the diversity of bacteriophage coat proteins. A list of such coat proteins includes, but is not limited to: Qβ, F2, GA, fr, JP501, M12, R17, BZ13, JP34, JP500, KU1, M11, MX1, TW18, VK, SP, FI, ID2, NL95, TW19, AP205, ϕCb5, ϕCb8r, ϕCb12r, ϕCb23r, 7s and PRR1. These adaptor proteins or orthogonal RNA binding proteins can further recruit effector proteins or fusions which comprise one or more functional domains.

[0187] The functional domain may be selected from the group consisting of: transposase domain, integrase domain, recombinase domain, resolvase domain, invertase domain, protease domain, DNA methyltransferase domain, DNA hydroxylmethylase domain, DNA demethylase domain, histone acetylase domain, histone deacetylases domain, nuclease domain, repressor domain, activator domain, nuclear-localization signal domains, transcription-regulatory protein (or transcription complex recruiting) domain, cellular uptake activity associated domain, nucleic acid binding domain, antibody presentation domain, histone modifying enzymes, recruiter of histone modifying enzymes; inhibitor of histone modifying enzymes, histone methyltransferase, histone demethylase, histone kinase, histone phosphatase, histone ribosylase, histone deribosylase, histone ubiquitinase, histone deubiquitinase, histone biotinase and histone tail protease. The functional domain is a transcriptional activation domain, such as, without limitation, VP64, p65, MyoD1, HSF1, RTA, SET7/9 or a histone acetyltransferase. The functional domain may be a transcription repression domain, preferably KRAB. In one embodiment, the transcription repression domain is SID, or concatemers of SID (e.g., SID4X). In one embodiment, the functional domain is an epigenetic modifying domain, such that an epigenetic modifying enzyme is provided. In an embodiment, the functional domain is an activation domain, which may be the P65 activation domain.

### Mismatches

[0188] In one embodiment, the guide molecule may comprise a mismatch. The mismatch may be up- or downstream of a single nucleotide variation on the one or more guide sequences. Modulations of cleavage efficiency can be exploited by introduction of mismatches, e.g., 1 or more mismatches, such as 1 or 2 mismatches between the guide sequence and target sequence. The more central (i.e., not 3′ or 5′) for instance a double mismatch is, the more cleavage efficiency is affected. Accordingly, by choosing mismatch position along the guide sequence, cleavage efficiency can be modulated. By means of example, if less than 100% cleavage of targets is desired (e.g., in a cell population), 1 or more, such as preferably 2 mismatches between the guide sequence and target sequence may be introduced in the guide sequences. The more central along the guide sequence of the mismatch position, the lower the cleavage percentage. In an embodiment, the cleavage efficiency may be exploited to design single guides that can distinguish two or more targets that vary by a single nucleotide, such as a single nucleotide polymorphism (SNP), variation, or (point) mutation. The CRISPR effector may have reduced sensitivity to SNPs (or other single nucleotide variations) and continue to cleave SNP targets with a certain level of efficiency. Thus, for two targets, or a set of targets, a guide molecule may be designed with a nucleotide sequence that is complementary to one of the targets i.e., the on-target SNP. The guide molecule is further designed to have a synthetic mismatch. As used herein a “synthetic mismatch” refers to a non-naturally occurring mismatch that is introduced upstream or downstream of the naturally occurring SNP, such as at most 5 nucleotides upstream or downstream, for instance 4, 3, 2, or 1 nucleotide upstream or downstream, preferably at most 3 nucleotides upstream or downstream, more preferably at most 2 nucleotides upstream or downstream, most preferably 1 nucleotide upstream or downstream (i.e., adjacent the SNP). When the CRISPR effector binds to the on-target SNP, only a single mismatch will be formed with the synthetic mismatch and the CRISPR effector will continue to be activated and a detectable signal produced. When the guide RNA hybridizes to an off-target SNP, two mismatches will be formed, the mismatch from the SNP and the synthetic mismatch, and no detectable signal generated. Thus, the systems disclosed herein may be designed to distinguish SNPs within a population. For, example the systems may be used to distinguish pathogenic strains that differ by a single SNP or detect certain disease specific SNPs, such as but not limited to, disease associated SNPs, such as without limitation cancer associated SNPs.

[0189] In an embodiment, the guide molecule is designed such that the mismatch (e.g., the synthetic mismatch, e.g., an additional mutation besides a SNP) is located on position 1, 2, 3, 4, 5, 6, 7, 8, 9, 10, 11, 12, 13, 14, 15, 16, 17, 18, 19, 20, 21, 22, 23, 24, 25, 26, 27, 28, 29, or 30 of the spacer sequence (starting at the 5′ end). In one embodiment, the guide molecule is designed such that the mismatch is located on position 1, 2, 3, 4, 5, 6, 7, 8, or 9 of the spacer sequence (starting at the 5′ end). In one embodiment, the guide molecule is designed such that the mismatch is located on position 4, 5, 6, or 7 of the spacer sequence (starting at the 5′ end. In an embodiment, the guide molecule is designed such that the mismatch is located on position 5 of the guide sequence (starting at the 5′ end).

[0190] In an embodiment, the guide molecule is designed such that the mismatch is located 2 nucleotides upstream of the SNP (i.e., one intervening nucleotide). In one embodiment, the guide molecule is designed such that the mismatch is located 2 nucleotides downstream of the SNP (i.e., one intervening nucleotide). In one embodiment, the guide molecule is designed such that the mismatch is located on position 5 of the guide sequence (starting at the 5′ end) and the SNP is located on position 3 of the guide sequence (starting at the 5′ end).

### Additional CRISPR-Cas Development and Use Considerations

[0191] The present invention may be further illustrated and extended based on aspects of CRISPR-Cas9 development and use as set forth in the following articles and particularly as relates to delivery of a CRISPR protein complex and uses of an RNA guided endonuclease in cells and organisms:
[0192] Multiplex genome engineering using CRISPR/Cas systems. Cong, L., Ran, F. A., Cox, D., Lin, S., Barretto, R., Habib, N., Hsu, P. D., Wu, X., Jiang, W., Marraffini, L. A., & Zhang, F. Science February 15; 339(6121):819-23 (2013);
[0193] RNA-guided editing of bacterial genomes using CRISPR-Cas systems. Jiang W., Bikard D., Cox D., Zhang F, Marraffini L A. Nat Biotechnol March; 31(3):233-9 (2013);
[0194] One-Step Generation of Mice Carrying Mutations in Multiple Genes by CRISPR/Cas-Mediated Genome Engineering. Wang H., Yang H., Shivalila C S., Dawlaty M M., Cheng A W., Zhang F., Jaenisch R. Cell May 9; 153(4):910-8 (2013);
[0195] Optical control of mammalian endogenous transcription and epigenetic states. Konermann S, Brigham M D, Trevino A E, Hsu P D, Heidenreich M, Cong L, Platt R J, Scott D A, Church G M, Zhang F. Nature. August 22; 500(7463):472-6. doi: 10.1038/Nature12466. Epub 2013 Aug. 23 (2013);
[0196] Double Nicking by RNA-Guided CRISPR Cas9 for Enhanced Genome Editing Specificity. Ran, FA., Hsu, PD., Lin, CY., Gootenberg, J S., Konermann, S., Trevino, AE., Scott, DA., Inoue, A., Matoba, S., Zhang, Y., & Zhang, F. Cell August 28. pii: S0092-8674(13)01015-5 (2013-A);
[0197] DNA targeting specificity of RNA-guided Cas9 nucleases. Hsu, P., Scott, D., Weinstein, J., Ran, FA., Konermann, S., Agarwala, V., Li, Y., Fine, E., Wu, X., Shalem, O., Cradick, TJ., Marraffini, LA., Bao, G., & Zhang, F. Nat Biotechnol doi: 10.1038/nbt.2647 (2013);
[0198] Genome engineering using the CRISPR-Cas9 system. Ran, FA., Hsu, PD., Wright, J., Agarwala, V., Scott, DA., Zhang, F. Nature Protocols November; 8 (11):2281-308 (2013-B);
[0199] Genome-Scale CRISPR-Cas9 Knockout Screening in Human Cells. Shalem, O., Sanjana, NE., Hartenian, E., Shi, X., Scott, DA., Mikkelson, T., Heckl, D., Ebert, BL., Root, DE., Doench, JG., Zhang, F. Science December 12. (2013). [Epub ahead of print];
[0200] Crystal structure of cas9 in complex with guide RNA and target DNA. Nishimasu, H., Ran, FA., Hsu, PD., Konermann, S., Shehata, SI., Dohmae, N., Ishitani, R., Zhang, F., Nureki, O. Cell February 27, 156(5):935-49 (2014);
[0201] Genome-wide binding of the CRISPR endonuclease Cas9 in mammalian cells. Wu X., Scott D A., Kriz A J., Chiu A C., Hsu P D., Dadon D B., Cheng A W., Trevino A E., Konermann S., Chen S., Jaenisch R., Zhang F., Sharp P A. Nat Biotechnol. April 20. doi: 10.1038/nbt.2889 (2014);
[0202] CRISPR-Cas9 Knockin Mice for Genome Editing and Cancer Modeling. Platt R J, Chen S, Zhou Y, Yim M J, Swiech L, Kempton H R, Dahlman J E, Parnas O, Eisenhaure™, Jovanovic M, Graham D B, Jhunjhunwala S, Heidenreich M, Xavier R J, Langer R, Anderson D G, Hacohen N, Regev A, Feng G, Sharp P A, Zhang F. Cell 159(2): 440-455 DOI: 10.1016/j.cell.2014.09.014(2014);
[0203] Development and Applications of CRISPR-Cas9 for Genome Engineering, Hsu P D, Lander E S, Zhang F., Cell. June 5; 157(6):1262-78 (2014).
[0204] Genetic screens in human cells using the CRISPR/Cas9 system, Wang T, Wei J J, Sabatini D M, Lander E S., Science. January 3; 343(6166):80-84. doi: 10.1126/science. 1246981 (2014);
[0205] Rational design of highly active sgRNAs for CRISPR-Cas9-mediated gene inactivation, Doench J G, Hartenian E, Graham D B, Tothova Z, Hegde M, Smith I, Sullender M, Ebert B L, Xavier R J, Root D E., (published online 3 Sep. 2014) Nat Biotechnol. December; 32(12):1262-7 (2014);
[0206] In vivo interrogation of gene function in the mammalian brain using CRISPR-Cas9, Swiech L, Heidenreich M, Banerjee A, Habib N, Li Y, Trombetta J, Sur M, Zhang F., (published online 19 Oct. 2014) Nat Biotechnol. January; 33(1):102-6 (2015);
[0207] Genome-scale transcriptional activation by an engineered CRISPR-Cas9 complex, Konermann S, Brigham M D, Trevino A E, Joung J, Abudayyeh O O, Barcena C, Hsu P D, Habib N, Gootenberg J S, Nishimasu H, Nureki O, Zhang F., Nature. January 29; 517(7536):583-8 (2015).
[0208] A split-Cas9 architecture for inducible genome editing and transcription modulation, Zetsche B, Volz S E, Zhang F., (published online 2 Feb. 2015) Nat Biotechnol. February; 33(2):139-42 (2015);
[0209] Genome-wide CRISPR Screen in a Mouse Model of Tumor Growth and Metastasis, Chen S, Sanjana N E, Zheng K, Shalem O, Lee K, Shi X, Scott D A, Song J, Pan J Q, Weissleder R, Lee H, Zhang F, Sharp P A. Cell 160, 1246-1260 Mar. 12, 2015 (multiplex screen in mouse), and
[0210] In vivo genome editing using Staphylococcus aureus Cas9, Ran F A, Cong L, Yan W X, Scott D A, Gootenberg J S, Kriz A J, Zetsche B, Shalem O, Wu X, Makarova K S, Koonin E V, Sharp P A, Zhang F., (published online 1 Apr. 2015), Nature. April 9; 520(7546):186-91 (2015).
[0211] Shalem et al., “High-throughput functional genomics using CRISPR-Cas9,” Nature Reviews Genetics 16, 299-311 (May 2015).
[0212] Xu et al., “Sequence determinants of improved CRISPR sgRNA design,” Genome Research 25, 1147-1157 (August 2015).
[0213] Parnas et al., “A Genome-wide CRISPR Screen in Primary Immune Cells to Dissect Regulatory Networks,” Cell 162, 675-686 (Jul. 30, 2015).
[0214] Ramanan et al., CRISPR/Cas9 cleavage of viral DNA efficiently suppresses hepatitis B virus,” Scientific Reports 5:10833. doi: 10.1038/srep10833 (Jun. 2, 2015)
[0215] Nishimasu et al., Crystal Structure of Staphylococcus aureus Cas9,” Cell 162, 1113-1126 (Aug. 27, 2015)
[0216] BCL11A enhancer dissection by Cas9-mediated in situ saturating mutagenesis, Canver et al., Nature 527(7577):192-7 (Nov. 12, 2015) doi: 10.1038/nature15521. Epub 2015 Sep. 16.
[0217] Cpf1 Is a Single RNA-Guided Endonuclease of a Class 2 CRISPR-Cas System, Zetsche et al., Cell 163, 759-71 (Sep. 25, 2015).
[0218] Discovery and Functional Characterization of Diverse Class 2 CRISPR-Cas Systems, Shmakov et al., Molecular Cell, 60(3), 385-397 doi: 10.1016/j.molcel.2015.10.008 Epub Oct. 22, 2015.
[0219] Rationally engineered Cas9 nucleases with improved specificity, Slaymaker et al., Science 2016 Jan. 1 351(6268): 84-88 doi: 10.1126/science.aad5227. Epub 2015 Dec. 1. [Epub ahead of print].
[0220] Gao et al, “Engineered Cpf1 Enzymes with Altered PAM Specificities,” bioRxiv 091611; doi: dx.doi.org/10.1101/091611 (Dec. 4, 2016) each of which is incorporated herein by reference, may be considered in the practice of the instant invention, and discussed briefly below:
[0221] Cong et al. engineered type II CRISPR-Cas systems for use in eukaryotic cells based on both Streptococcus thermophilus Cas9 and also Streptococcus pyogenes Cas9 and demonstrated that Cas9 nucleases can be directed by short RNAs to induce precise cleavage of DNA in human and mouse cells. Their study further showed that Cas9 as converted into a nicking enzyme can be used to facilitate homology-directed repair in eukaryotic cells with minimal mutagenic activity. Additionally, their study demonstrated that multiple guide sequences can be encoded into a single CRISPR array to enable simultaneous editing of several at endogenous genomic loci sites within the mammalian genome, demonstrating easy programmability and wide applicability of the RNA-guided nuclease technology. This ability to use RNA to program sequence specific DNA cleavage in cells defined a new class of genome engineering tools. These studies further showed that other CRISPR loci are likely to be transplantable into mammalian cells and can also mediate mammalian genome cleavage. Importantly, it can be envisaged that several aspects of the CRISPR-Cas system can be further improved to increase its efficiency and versatility.
[0222] Jiang et al. used the clustered, regularly interspaced, short palindromic repeats (CRISPR)-associated Cas9 endonuclease complexed with dual-RNAs to introduce precise mutations in the genomes of Streptococcus pneumoniae and Escherichia coli. The approach relied on dual-RNA:Cas9-directed cleavage at the targeted genomic site to kill unmutated cells and circumvents the need for selectable markers or counter-selection systems. The study reported reprogramming dual-RNA:Cas9 specificity by changing the sequence of short CRISPR RNA (crRNA) to make single- and multinucleotide changes carried on editing templates. The study showed that simultaneous use of two crRNAs enabled multiplex mutagenesis. Furthermore, when the approach was used in combination with recombineering, in S. pneumoniae, nearly 100% of cells that were recovered using the described approach contained the desired mutation, and in E. coli, 65% that were recovered contained the mutation.
[0223] Wang et al. (2013) used the CRISPR-Cas system for the one-step generation of mice carrying mutations in multiple genes which were traditionally generated in multiple steps by sequential recombination in embryonic stem cells and/or time-consuming intercrossing of mice with a single mutation. The CRISPR-Cas system will greatly accelerate the in vivo study of functionally redundant genes and of epistatic gene interactions.
[0224] Konermann et al. (2013) addressed the need in the art for versatile and robust technologies that enable optical and chemical modulation of DNA-binding domains based CRISPR Cas9 enzyme and also Transcriptional Activator Like Effectors
[0225] Ran et al. (2013-A) described an approach that combined a Cas9 nickase mutant with paired guide RNAs to introduce targeted double-strand breaks. This addresses the issue of the Cas9 nuclease from the microbial CRISPR-Cas system being targeted to specific genomic loci by a guide sequence, which can tolerate certain mismatches to the DNA target and thereby promote undesired off-target mutagenesis. Because individual nicks in the genome are repaired with high fidelity, simultaneous nicking via appropriately offset guide RNAs is required for double-stranded breaks and extends the number of specifically recognized bases for target cleavage. The authors demonstrated that using paired nicking can reduce off-target activity by 50- to 1,500-fold in cell lines and to facilitate gene knockout in mouse zygotes without sacrificing on-target cleavage efficiency. This versatile strategy enables a wide variety of genome editing applications that require high specificity.
[0226] Hsu et al. (2013) characterized SpCas9 targeting specificity in human cells to inform the selection of target sites and avoid off-target effects. The study evaluated >700 guide RNA variants and SpCas9-induced indel mutation levels at >100 predicted genomic off-target loci in 293T and 293 FT cells. The authors that SpCas9 tolerates mismatches between guide RNA and target DNA at different positions in a sequence-dependent manner, sensitive to the number, position and distribution of mismatches. The authors further showed that SpCas9-mediated cleavage is unaffected by DNA methylation and that the dosage of SpCas9 and gRNA can be titrated to minimize off-target modification. Additionally, to facilitate mammalian genome engineering applications, the authors reported providing a web-based software tool to guide the selection and validation of target sequences as well as off-target analyses.
[0227] Ran et al. (2013-B) described a set of tools for Cas9-mediated genome editing via non-homologous end joining (NHEJ) or homology-directed repair (HDR) in mammalian cells, as well as generation of modified cell lines for downstream functional studies. To minimize off-target cleavage, the authors further described a double-nicking strategy using the Cas9 nickase mutant with paired guide RNAs. The protocol provided by the authors experimentally derived guidelines for the selection of target sites, evaluation of cleavage efficiency and analysis of off-target activity. The studies showed that beginning with target design, gene modifications can be achieved within as little as 1-2 weeks, and modified clonal cell lines can be derived within 2-3 weeks.
[0228] Shalem et al. described a new way to interrogate gene function on a genome-wide scale. Their studies showed that delivery of a genome-scale CRISPR-Cas9 knockout (GeCKO) library targeted 18,080 genes with 64,751 unique guide sequences enabled both negative and positive selection screening in human cells. First, the authors showed use of the GeCKO library to identify genes essential for cell viability in cancer and pluripotent stem cells. Next, in a melanoma model, the authors screened for genes whose loss is involved in resistance to vemurafenib, a therapeutic that inhibits mutant protein kinase BRAF. Their studies showed that the highest-ranking candidates included previously validated genes NF1 and MED12 as well as novel hits NF2, CUL3, TADA2B, and TADA1. The authors observed a high level of consistency between independent guide RNAs targeting the same gene and a high rate of hit confirmation, and thus demonstrated the promise of genome-scale screening with Cas9.
[0229] Nishimasu et al. reported the crystal structure of Streptococcus pyogenes Cas9 in complex with sgRNA and its target DNA at 2.5 A° resolution. The structure revealed a bilobed architecture composed of target recognition and nuclease lobes, accommodating the sgRNA:DNA heteroduplex in a positively charged groove at their interface. Whereas the recognition lobe is essential for binding sgRNA and DNA, the nuclease lobe contains the HNH and RuvC nuclease domains, which are properly positioned for cleavage of the complementary and non-complementary strands of the target DNA, respectively. The nuclease lobe also contains a carboxyl-terminal domain responsible for the interaction with the protospacer adjacent motif (PAM). This high-resolution structure and accompanying functional analyses have revealed the molecular mechanism of RNA-guided DNA targeting by Cas9, thus paving the way for the rational design of new, versatile genome-editing technologies.
[0230] Wu et al. mapped genome-wide binding sites of a catalytically inactive Cas9 (dCas9) from Streptococcus pyogenes loaded with single guide RNAs (sgRNAs) in mouse embryonic stem cells (mESCs). The authors showed that each of the four sgRNAs tested targets dCas9 to between tens and thousands of genomic sites, frequently characterized by a 5-nucleotide seed region in the sgRNA and an NGG protospacer adjacent motif (PAM). Chromatin inaccessibility decreases dCas9 binding to other sites with matching seed sequences; thus 70% of off-target sites are associated with genes. The authors showed that targeted sequencing of 295 dCas9 binding sites in mESCs transfected with catalytically active Cas9 identified only one site mutated above background levels. The authors proposed a two-state model for Cas9 binding and cleavage, in which a seed match triggers binding but extensive pairing with target DNA is required for cleavage.
[0231] Platt et al. established a Cre-dependent Cas9 knockin mouse. The authors demonstrated in vivo as well as ex vivo genome editing using adeno-associated virus (AAV)-, lentivirus-, or particle-mediated delivery of guide RNA in neurons, immune cells, and endothelial cells.
[0232] Hsu et al. (2014) is a review article that discusses generally CRISPR-Cas9 history from yogurt to genome editing, including genetic screening of cells.
[0233] Wang et al. (2014) relates to a pooled, loss-of-function genetic screening approach suitable for both positive and negative selection that uses a genome-scale lentiviral single guide RNA (sgRNA) library.
[0234] Doench et al. created a pool of sgRNAs, tiling across all possible target sites of a panel of six endogenous mouse and three endogenous human genes and quantitatively assessed their ability to produce null alleles of their target gene by antibody staining and flow cytometry. The authors showed that optimization of the PAM improved activity and also provided an on-line tool for designing sgRNAs.
[0235] Swiech et al. demonstrate that AAV-mediated SpCas9 genome editing can enable reverse genetic studies of gene function in the brain.
[0236] Konermann et al. (2015) discusses the ability to attach multiple effector domains, e.g., transcriptional activator, functional and epigenomic regulators at appropriate positions on the guide such as stem or tetraloop with and without linkers.
[0237] Zetsche et al. demonstrates that the Cas9 enzyme can be split into two and hence the assembly of Cas9 for activation can be controlled.
[0238] Chen et al. relates to multiplex screening by demonstrating that a genome-wide in vivo CRISPR-Cas9 screen in mice reveals genes regulating lung metastasis.
[0239] Ran et al. (2015) relates to SaCas9 and its ability to edit genomes and demonstrates that one cannot extrapolate from biochemical assays.
[0240] Shalem et al. (2015) described ways in which catalytically inactive Cas9 (dCas9) fusions are used to synthetically repress (CRISPRi) or activate (CRISPRa) expression, showing. advances using Cas9 for genome-scale screens, including arrayed and pooled screens, knockout approaches that inactivate genomic loci and strategies that modulate transcriptional activity.
[0241] Xu et al. (2015) assessed the DNA sequence features that contribute to single guide RNA (sgRNA) efficiency in CRISPR-based screens. The authors explored efficiency of CRISPR/Cas9 knockout and nucleotide preference at the cleavage site. The authors also found that the sequence preference for CRISPRi/a is substantially different from that for CRISPR/Cas9 knockout.
[0242] Parnas et al. (2015) introduced genome-wide pooled CRISPR-Cas9 libraries into dendritic cells (DCs) to identify genes that control the induction of tumor necrosis factor (Tnf) by bacterial lipopolysaccharide (LPS). Known regulators of Tlr4 signaling and previously unknown candidates were identified and classified into three functional modules with distinct effects on the canonical responses to LPS.
[0243] Ramanan et al (2015) demonstrated cleavage of viral episomal DNA (cccDNA) in infected cells. The HBV genome exists in the nuclei of infected hepatocytes as a 3.2 kb double-stranded episomal DNA species called covalently closed circular DNA (cccDNA), which is a key component in the HBV life cycle whose replication is not inhibited by current therapies. The authors showed that sgRNAs specifically targeting highly conserved regions of HBV robustly suppresses viral replication and depleted cccDNA.
[0244] Nishimasu et al. (2015) reported the crystal structures of SaCas9 in complex with a single guide RNA (sgRNA) and its double-stranded DNA targets, containing the 5′-TTGAAT-3′ PAM and the 5′-TTGGGT-3′ PAM. A structural comparison of SaCas9 with SpCas9 highlighted both structural conservation and divergence, explaining their distinct PAM specificities and orthologous sgRNA recognition.
[0245] Canver et al. (2015) demonstrated a CRISPR-Cas9-based functional investigation of non-coding genomic elements. The authors we developed pooled CRISPR-Cas9 guide RNA libraries to perform in situ saturating mutagenesis of the human and mouse BCL11A enhancers which revealed critical features of the enhancers.
[0246] Zetsche et al. (2015) reported characterization of Cpf1, a class 2 CRISPR nuclease from Francisella novicida U112 having features distinct from Cas9. Cpf1 is a single RNA-guided endonuclease lacking tracrRNA, utilizes a T-rich protospacer-adjacent motif, and cleaves DNA via a staggered DNA double-stranded break.
[0247] Shmakov et al. (2015) reported three distinct Class 2 CRISPR-Cas systems. Two system CRISPR enzymes (C2c1 and C2c3) contain RuvC-like endonuclease domains distantly related to Cpf1. Unlike Cpf1, C2c1 depends on both crRNA and tracrRNA for DNA cleavage. The third enzyme (C2c2) contains two predicted HEPN RNase domains and is tracrRNA independent.
[0248] Slaymaker et al (2016) reported the use of structure-guided protein engineering to improve the specificity of Streptococcus pyogenes Cas9 (SpCas9). The authors developed “enhanced specificity” SpCas9 (eSpCas9) variants which maintained robust on-target cleavage with reduced off-target effects.

[0249] The methods and tools provided herein are exemplified for certain Cas effectors. Further nucleases with similar properties can be identified using methods described in the art (Shmakov et al. 2015, 60:385-397; Abudayeh et al. 2016, Science, 5; 353(6299)). In particular embodiments, such methods for identifying novel CRISPR effector proteins may comprise the steps of selecting sequences from the database encoding a seed which identifies the presence of a CRISPR Cas locus, identifying loci located within 10 kb of the seed comprising Open Reading Frames (ORFs) in the selected sequences, selecting therefrom loci comprising ORFs of which only a single ORF encodes a novel CRISPR effector having greater than 700 amino acids and no more than 90% homology to a known CRISPR effector. In particular embodiments, the seed is a protein that is common to the CRISPR-Cas system, such as Cas1. In further embodiments, the CRISPR array is used as a seed to identify new effector proteins.

[0250] Also, “Dimeric CRISPR RNA-guided FokI nucleases for highly specific genome editing”, Shengdar Q. Tsai, Nicolas Wyvekens, Cyd Khayter, Jennifer A. Foden, Vishal Thapar, Deepak Reyon, Mathew J. Goodwin, Martin J. Aryee, J. Keith Joung Nature Biotechnology 32(6): 569-77 (2014), relates to dimeric RNA-guided FokI Nucleases that recognize extended sequences and can edit endogenous genes with high efficiencies in human cells.

[0251] With respect to general information on CRISPR-Cas Systems, components thereof, and delivery of such components, including methods, materials, delivery vehicles, vectors, particles, AAV, and making and using thereof, including as to amounts and formulations, all useful in the practice of the instant invention, reference is made to: U.S. Pat. Nos. 8,697,359, 8,771,945, 8,795,965, 8,865,406, 8,871,445, 8,889,356, 8,889,418, 8,895,308, 8,906,616, 8,932,814, 8,945,839, 8,993,233 and 8,999,641; US Patent Publications US 2014-0310830 (U.S. application Ser. No. 14/105,031), US 2014-0287938 A1 (U.S. application Ser. No. 14/213,991), US 2014-0273234 A1 (U.S. application Ser. No. 14/293,674), US2014-0273232 A1 (U.S. application Ser. No. 14/290,575), US 2014-027323 A1 (U.S. application Ser. No. 14/259,420), US 2014-0256046 A1 (U.S. application Ser. No. 14/226,274), US 2014-0248702 A1 (U.S. application Ser. No. 14/258,458), US 2014-0242700 A1 (U.S. application Ser. No. 14/222,930), US 2014-0242699 A1 (U.S. application Ser. No. 14/183,512), US 2014-0242664 A1 (U.S. application Ser. No. 14/104,990), US 2014-0234972 A1 (U.S. application Ser. No. 14/183,471), US 2014-0227787 A1 (U.S. application Ser. No. 14/256,912), US 2014-0189896 A1 (U.S. application Ser. No. 14/105,035), US 2014-0186958 A1 (U.S. application Ser. No. 14/105,017), US 2014-0186919 A1 (U.S. application Ser. No. 14/104,977), US 2014-0186843 A1 (U.S. application Ser. No. 14/104,900), US 2014-0179770 A1 (U.S. application Ser. No. 14/104,837) and US 2014-0179006 A1 (U.S. application Ser. No. 14/183,486), US 2014-0170753 A1 (U.S. application Ser. No. 14/183,429); US 2015-0184139 A1 (U.S. application Ser. No. 14/324,960); Ser. No. 14/054,414 European Patent Applications EP 2771468 (EP13818570.7), EP 2764103 (EP13824232.6), and EP 2784162 (EP14170383.5); and PCT Patent Publications WO 2014/093661 (PCT/US2013/074743), WO 2014/093694 (PCT/US2013/074790), WO 2014/093595 (PCT/US2013/074611), WO 2014/093718 (PCT/US2013/074825), WO 2014/093709 (PCT/US2013/074812), WO 2014/093622 (PCT/US2013/074667), WO 2014/093635 (PCT/US2013/074691), WO 2014/093655 (PCT/US2013/074736), WO 2014/093712 (PCT/US2013/074819), WO 2014/093701 (PCT/US2013/074800), WO 2014/018423 (PCT/US2013/051418), WO 2014/204723 (PCT/US2014/041790), WO 2014/204724 (PCT/US2014/041800), WO 2014/204725 (PCT/US2014/041803), WO 2014/204726 (PCT/US2014/041806), WO 2014/204728 (PCT/US2014/041804), WO 2014/204727 (PCT/US2014/041808), WO 2014/204729 (PCT/US2014/041809), WO 2015/089351 (PCT/US2014/069897), WO 2015/089354 (PCT/US2014/069902), WO 2015/089364 (PCT/US2014/069925), WO 2015/089427 (PCT/US2014/070068), WO 2015/089462 (PCT/US2014/070127), WO 2015/089419 (PCT/US2014/070057), WO 2015/089465 (PCT/US2014/070135), WO 2015/089486 (PCT/US2014/070175), PCT/US2015/051691, PCT/US2015/051830. Reference is also made to U.S. provisional patent applications 61/758,468; 61/802,174; 61/806,375; 61/814,263; 61/819,803 and 61/828,130, filed on Jan. 30, 2013; Mar. 15, 2013; Mar. 28, 2013; Apr. 20, 2013; May 6, 2013 and May 28, 2013 respectively. Reference is also made to US provisional patent application 61/836,123, filed on Jun. 17, 2013. Reference is additionally made to U.S. provisional patent applications 61/835,931, 61/835,936, 61/835,973, 61/836,080, 61/836,101, and 61/836,127, each filed Jun. 17, 2013. Further reference is made to U.S. provisional patent applications 61/862,468 and 61/862,355 filed on Aug. 5, 2013; 61/871,301 filed on Aug. 28, 2013; 61/960,777 filed on Sep. 25, 2013 and 61/961,980 filed on Oct. 28, 2013. Reference is yet further made to: PCT/US2014/62558 filed Oct. 28, 2014, and U.S. Provisional Patent Applications Ser. Nos. 61/915,148, 61/915,150, 61/915,153, 61/915,203, 61/915,251, 61/915,301, 61/915,267, 61/915,260, and 61/915,397, each filed Dec. 12, 2013; 61/757,972 and 61/768,959, filed on Jan. 29, 2013 and Feb. 25, 2013; 62/010,888 and 62/010,879, both filed Jun. 11, 2014; 62/010,329, 62/010,439 and 62/010,441, each filed Jun. 10, 2014; 61/939,228 and 61/939,242, each filed Feb. 12, 2014; 61/980,012, filed Apr. 15, 2014; 62/038,358, filed Aug. 17, 2014; 62/055,484, 62/055,460 and 62/055,487, each filed Sep. 25, 2014; and 62/069,243, filed Oct. 27, 2014. Reference is made to PCT application designating, inter alia, the United States, application No. PCT/US14/41806, filed Jun. 10, 2014. Reference is made to U.S. provisional patent application 61/930,214 filed on Jan. 22, 2014. Reference is made to PCT application designating, inter alia, the United States, application No. PCT/US14/41806, filed Jun. 10, 2014.

[0252] Mention is also made of U.S. Provisional Application No. 62/180,709, filed 17 Jun. 2015, PROTECTED GUIDE RNAS (PGRNAS); U.S. Provisional Application No. 62/091,455, filed 12 Dec. 2014, PROTECTED GUIDE RNAS (PGRNAS); U.S. Provisional Application No. 62/096,708, filed 24 Dec. 2014, PROTECTED GUIDE RNAS (PGRNAS); US Provisional Application Nos. 62/091,462, filed 12 Dec. 2014, 62/096,324, filed 23 Dec. 2014, 62/180,681, filed 17 Jun. 2015, and 62/237,496, filed 5 Oct. 2015, DEAD GUIDES FOR CRISPR TRANSCRIPTION FACTORS; U.S. Provisional Application Nos. 62/091,456, filed 12 Dec. 2014 and 62/180,692, filed 17 Jun. 2015, ESCORTED AND FUNCTIONALIZED GUIDES FOR CRISPR-CAS SYSTEMS; U.S. Provisional Application No. 62/091,461, filed 12 Dec. 2014, DELIVERY, USE AND THERAPEUTIC APPLICATIONS OF THE CRISPR-CAS SYSTEMS AND COMPOSITIONS FOR GENOME EDITING AS TO HEMATOPOETIC STEM CELLS (HSCs); U.S. Provisional Application No. 62/094,903, filed 19 Dec. 2014, UNBIASED IDENTIFICATION OF DOUBLE-STRAND BREAKS AND GENOMIC REARRANGEMENT BY GENOME-WISE INSERT CAPTURE SEQUENCING; U.S. Provisional Application No. 62/096,761, filed 24 Dec. 2014, ENGINEERING OF SYSTEMS, METHODS AND OPTIMIZED ENZYME AND GUIDE SCAFFOLDS FOR SEQUENCE MANIPULATION; U.S. Provisional Application No. 62/098,059, filed 30 Dec. 2014, 62/181,641, filed 18 Jun. 2015, and 62/181,667, filed 18 Jun. 2015, RNA-TARGETING SYSTEM; U.S. Provisional Application No. 62/096,656, filed 24 Dec. 2014 and 62/181,151, filed 17 Jun. 2015, CRISPR HAVING OR ASSOCIATED WITH DESTABILIZATION DOMAINS; U.S. Provisional Application No. 62/096,697, filed 24 Dec. 2014, CRISPR HAVING OR ASSOCIATED WITH AAV; US Provisional Application 62/098,158, filed 30 Dec. 2014, ENGINEERED CRISPR COMPLEX INSERTIONAL TARGETING SYSTEMS; U.S. Provisional Application No. 62/151,052, filed 22 Apr. 2015, CELLULAR TARGETING FOR EXTRACELLULAR EXOSOMAL REPORTING; U.S. Provisional Application No. 62/054,490, filed 24 Sep. 2014, DELIVERY, USE AND THERAPEUTIC APPLICATIONS OF THE CRISPR-CAS SYSTEMS AND COMPOSITIONS FOR TARGETING DISORDERS AND DISEASES USING PARTICLE DELIVERY COMPONENTS; U.S. Provisional Application No. 61/939,154, 12 Feb. 2014, SYSTEMS, METHODS AND COMPOSITIONS FOR SEQUENCE MANIPULATION WITH OPTIMIZED FUNCTIONAL CRISPR-CAS SYSTEMS; U.S. Provisional Application No. 62/055,484, filed 25 Sep. 2014, SYSTEMS, METHODS AND COMPOSITIONS FOR SEQUENCE MANIPULATION WITH OPTIMIZED FUNCTIONAL CRISPR-CAS SYSTEMS; U.S. Provisional Application No. 62/087,537, filed 4 Dec. 2014, SYSTEMS, METHODS AND COMPOSITIONS FOR SEQUENCE MANIPULATION WITH OPTIMIZED FUNCTIONAL CRISPR-CAS SYSTEMS; U.S. Provisional Application No. 62/054,651, filed 24 Sep. 2014, DELIVERY, USE AND THERAPEUTIC APPLICATIONS OF THE CRISPR-CAS SYSTEMS AND COMPOSITIONS FOR MODELING COMPETITION OF MULTIPLE CANCER MUTATIONS IN VIVO; U.S. Provisional Application No. 62/067,886, filed 23 Oct. 2014, DELIVERY, USE AND THERAPEUTIC APPLICATIONS OF THE CRISPR-CAS SYSTEMS AND COMPOSITIONS FOR MODELING COMPETITION OF MULTIPLE CANCER MUTATIONS IN VIVO; U.S. Provisional Application Nos. 62/054,675, filed 24 Sep. 2014 and 62/181,002, filed 17 Jun. 2015, DELIVERY, USE AND THERAPEUTIC APPLICATIONS OF THE CRISPR-CAS SYSTEMS AND COMPOSITIONS IN NEURONAL CELLS/TISSUES; U.S. Provisional Application 62/054,528, filed 24 Sep. 2014, DELIVERY, USE AND THERAPEUTIC APPLICATIONS OF THE CRISPR-CAS SYSTEMS AND COMPOSITIONS IN IMMUNE DISEASES OR DISORDERS; U.S. Provisional Application No. 62/055,454, filed 25 Sep. 2014, DELIVERY, USE AND THERAPEUTIC APPLICATIONS OF THE CRISPR-CAS SYSTEMS AND COMPOSITIONS FOR TARGETING DISORDERS AND DISEASES USING CELL PENETRATION PEPTIDES (CPP); U.S. Provisional Application No. 62/055,460, filed 25 Sep. 2014, MULTIFUNCTIONAL-CRISPR COMPLEXES AND/OR OPTIMIZED ENZYME LINKED FUNCTIONAL-CRISPR COMPLEXES; U.S. Provisional Application No. 62/087,475, filed 4 Dec. 2014 and 62/181,690, filed 18 Jun. 2015, FUNCTIONAL SCREENING WITH OPTIMIZED FUNCTIONAL CRISPR-CAS SYSTEMS; U.S. Provisional Application 62/055,487, filed 25 Sep. 2014, FUNCTIONAL SCREENING WITH OPTIMIZED FUNCTIONAL CRISPR-CAS SYSTEMS; U.S. Provisional Application No. 62/087,546, filed 4 Dec. 2014 and 62/181,687, filed 18 Jun. 2015, MULTIFUNCTIONAL CRISPR COMPLEXES AND/OR OPTIMIZED ENZYME LINKED FUNCTIONAL-CRISPR COMPLEXES; and U.S. Provisional Application 62/098,285, filed 30 Dec. 2014, CRISPR MEDIATED IN VIVO) MODELING AND GENETIC SCREENING OF TUMOR GROWTH AND METASTASIS.

[0253] Mention is made of U.S. Provisional Application Nos. 62/181,659, filed 18 Jun. 2015 and 62/207,318, filed 19 Aug. 2015, ENGINEERING AND OPTIMIZATION OF SYSTEMS, METHODS, ENZYME AND GUIDE SCAFFOLDS OF CAS9 ORTHOLOGS AND VARIANTS FOR SEQUENCE MANIPULATION. Mention is made of U.S. Provisional Applications Nos. 62/181,663, filed 18 Jun. 2015 and 62/245,264, filed 22 Oct. 2015, NOVEL CRISPR ENZYMES AND SYSTEMS, U.S. Provisional Application Nos. 62/181,675, filed 18 Jun. 2015, 62/285,349, filed 22 Oct. 2015, 62/296,522, filed 17 Feb. 2016, and 62/320,231, filed 8 Apr. 2016, NOVEL CRISPR ENZYMES AND SYSTEMS, U.S. Provisional Application No. 62/232,067, filed 24 Sep. 2015, U.S. application Ser. No. 14/975,085, filed 18 Dec. 2015, European Application No. 16150428.7, U.S. Provisional Application 62/205,733, filed 16 Aug. 2015, U.S. Provisional Application 62/201,542, filed 5 Aug. 2015, U.S. Provisional Application No. 62/193,507, filed 16 Jul. 2015, and U.S. Provisional Application No. 62/181,739, filed 18 Jun. 2015, each entitled NOVEL CRISPR ENZYMES AND SYSTEMS, and of U.S. Provisional Application No. 62/245,270, filed 22 Oct. 2015, NOVEL CRISPR ENZYMES AND SYSTEMS. Mention is also made of U.S. Provisional Application No. 61/939,256, filed 12 Feb. 2014, and WO 2015/089473 (PCT/US2014/070152), filed 12 Dec. 2014, each entitled ENGINEERING OF SYSTEMS, METHODS AND OPTIMIZED GUIDE COMPOSITIONS WITH NEW ARCHITECTURES FOR SEQUENCE MANIPULATION. Mention is also made of International Application No. PCT/US2015/045504, filed 15 Aug. 2015, U.S. Provisional Application No. 62/180,699, filed 17 Jun. 2015, and U.S. Provisional Application No. 62/038,358, filed 17 Aug. 2014, each entitled GENOME EDITING USING CAS9 NICKASES.

[0254] In addition, mention is made of PCT application PCT/US14/70057, Attorney Reference 47627.99.2060 and BI-2013/107 entitled “DELIVERY, USE AND THERAPEUTIC APPLICATIONS OF THE CRISPR-CAS SYSTEMS AND COMPOSITIONS FOR TARGETING DISORDERS AND DISEASES USING PARTICLE DELIVERY COMPONENTS (claiming priority from one or more or all of US provisional patent applications: 62/054,490, filed Sep. 24, 2014; 62/010,441, filed Jun. 10, 2014; and 61/915,118, 61/915,215 and 61/915,148, each filed on Dec. 12, 2013) (“the Particle Delivery PCT”), incorporated herein by reference, and of PCT application PCT/US14/70127, Attorney Reference 47627.99.2091 and BI-2013/101 entitled “DELIVERY, USE AND THERAPEUTIC APPLICATIONS OF THE CRISPR-CAS SYSTEMS AND COMPOSITIONS FOR GENOME EDITING” (claiming priority from one or more or all of US provisional patent applications: 61/915,176; 61/915,192; 61/915,215; 61/915,107, 61/915,145; 61/915,148; and 61/915,153 each filed Dec. 12, 2013) (“the Eye PCT”), incorporated herein by reference, with respect to a method of preparing an sgRNA-and-Cas protein containing particle comprising admixing a mixture comprising an sgRNA and Cas effector protein (and optionally HDR template) with a mixture comprising or consisting essentially of or consisting of surfactant, phospholipid, biodegradable polymer, lipoprotein and alcohol; and particles from such a process. For example, wherein the Cas protein and sgRNA were mixed together at a suitable, e.g., 3:1 to 1:3 or 2:1 to 1:2 or 1:1 molar ratio, at a suitable temperature, e.g., 15-30 C, e.g., 20-25 C, e.g., room temperature, for a suitable time, e.g., 15-45, such as 30 minutes, advantageously in sterile, nuclease free buffer, e.g., 1×PBS. Separately, particle components such as or comprising: a surfactant, e.g., cationic lipid, e.g., 1,2-dioleoyl-3-trimethylammonium-propane (DOTAP); phospholipid, e.g., dimyristoylphosphatidylcholine (DMPC); biodegradable polymer, such as an ethylene-glycol polymer or PEG, and a lipoprotein, such as a low-density lipoprotein, e.g., cholesterol were dissolved in an alcohol, advantageously a C1-6 alkyl alcohol, such as methanol, ethanol, isopropanol, e.g., 100% ethanol. The two solutions were mixed together to form particles containing the Cas9-sgRNA complexes. Accordingly, sgRNA may be pre-complexed with the Cas protein, before formulating the entire complex in a particle. Formulations may be made with a different molar ratio of different components known to promote delivery of nucleic acids into cells (e.g. 1,2-dioleoyl-3-trimethylammonium-propane (DOTAP), 1,2-ditetradecanoyl-sn-glycero-3-phosphocholine (DMPC), polyethylene glycol (PEG), and cholesterol) For example DOTAP:DMPC:PEG:Cholesterol Molar Ratios may be DOTAP 100, DMPC 0, PEG 0, Cholesterol 0; or DOTAP 90, DMPC 0, PEG 10, Cholesterol 0; or DOTAP 90, DMPC 0, PEG 5, Cholesterol 5. DOTAP 100, DMPC 0, PEG 0, Cholesterol 0.

### Other Exemplary Nucleotide-Binding Molecules and Systems

[0255] In an embodiment, the system or composition herein comprises one or more transposases and one or more nucleotide-binding molecules that are not components of a CRISPR-Cas system. Examples of the other nucleotide-binding molecules may be components of transcription activator-like effector nuclease (TALEN), Zn finger nucleases, meganucleases, a functional fragment thereof, a variant thereof, of any combination thereof. In some examples, the systems comprise i) one or more components of a TALEN system, Zn finger nuclease system, or meganuclease system, and ii) one or more transposases described herein.

### TALE Systems

[0256] In some embodiment, the nucleotide-binding molecule in the systems may be a transcription activator-like effector nuclease, a functional fragment thereof, or a variant thereof. The present disclosure also includes nucleotide sequences that are or encode one or more components of a TALE system. As disclosed herein editing can be made by way of the transcription activator-like effector nucleases (TALENs) system. Transcription activator-like effectors (TALEs) can be engineered to bind practically any desired DNA sequence. Exemplary methods of genome editing using the TALEN system can be found for example in Cermak T. Doyle E L. Christian M. Wang L. Zhang Y. Schmidt C, et al. Efficient design and assembly of custom TALEN and other TAL effector-based constructs for DNA targeting. Nucleic Acids Res. 2011; 39:e82; Zhang F. Cong L. Lodato S. Kosuri S. Church G M. Arlotta P Efficient construction of sequence-specific TAL effectors for modulating mammalian transcription. Nat Biotechnol. 2011; 29:149-153 and U.S. Pat. Nos. 8,450,471, 8,440,431 and 8,440,432, all of which are specifically incorporated by reference.

[0257] In an embodiment, provided herein include isolated, non-naturally occurring, recombinant or engineered DNA binding proteins that comprise TALE monomers as a part of their organizational structure that enable the targeting of nucleic acid sequences with improved efficiency and expanded specificity.

[0258] Naturally occurring TALEs or “wild type TALEs” are nucleic acid binding proteins secreted by numerous species of proteobacteria. TALE polypeptides contain a nucleic acid binding domain composed of tandem repeats of highly conserved monomer polypeptides that are predominantly 33, 34 or 35 amino acids in length and that differ from each other mainly in amino acid positions 12 and 13. In advantageous embodiments the nucleic acid is DNA. As used herein, the term “polypeptide monomers”, or “TALE monomers” will be used to refer to the highly conserved repetitive polypeptide sequences within the TALE nucleic acid binding domain and the term “repeat variable di-residues” or “RVD” will be used to refer to the highly variable amino acids at positions 12 and 13 of the polypeptide monomers. As provided throughout the disclosure, the amino acid residues of the RVD are depicted using the IUPAC single letter code for amino acids. A general representation of a TALE monomer which is comprised within the DNA binding domain is X₁₋₁₁-(X₁₂X₁₃)-X₁₄₋₃₃ or ₃₄ or ₃₅, where the subscript indicates the amino acid position and X represents any amino acid. X₁₂X₁₃ indicate the RVDs. In some polypeptide monomers, the variable amino acid at position 13 is missing or absent and in such polypeptide monomers, the RVD consists of a single amino acid. In such cases the RVD may be alternatively represented as X*, where X represents X12 and (*) indicates that X13 is absent. The DNA binding domain comprises several repeats of TALE monomers and this may be represented as (X₁₋₁₁-(X₁₂X₁₃)-X₁₄₋₃₃ or ₃₄ or ₃₅)z, where in an advantageous embodiment, z is at least 5 to 40. In a further advantageous embodiment, z is at least 10 to 26.

[0259] The TALE monomers have a nucleotide binding affinity that is determined by the identity of the amino acids in its RVD. For example, polypeptide monomers with an RVD of NI preferentially bind to adenine (A), polypeptide monomers with an RVD of NG preferentially bind to thymine (T), polypeptide monomers with an RVD of HD preferentially bind to cytosine (C) and polypeptide monomers with an RVD of NN preferentially bind to both adenine (A) and guanine (G). In yet another embodiment of the invention, polypeptide monomers with an RVD of IG preferentially bind to T. Thus, the number and order of the polypeptide monomer repeats in the nucleic acid binding domain of a TALE determines its nucleic acid target specificity. In still further embodiments of the invention, polypeptide monomers with an RVD of NS recognize all four base pairs and may bind to A, T, G or C. The structure and function of TALEs is further described in, for example, Moscou et al., Science 326:1501 (2009); Boch et al., Science 326:1509-1512 (2009); and Zhang et al., Nature Biotechnology 29:149-153 (2011), each of which is incorporated by reference in its entirety.

[0260] The TALE polypeptides used in methods of the invention are isolated, non-naturally occurring, recombinant or engineered nucleic acid-binding proteins that have nucleic acid or DNA binding regions containing polypeptide monomer repeats that are designed to target specific nucleic acid sequences.

[0261] As described herein, polypeptide monomers having an RVD of HN or NH preferentially bind to guanine and thereby allow the generation of TALE polypeptides with high binding specificity for guanine containing target nucleic acid sequences. In a preferred embodiment of the invention, polypeptide monomers having RVDs RN, NN, NK, SN, NH, KN, HN, NQ, HH, RG, KH, RH and SS preferentially bind to guanine. In a much more advantageous embodiment of the invention, polypeptide monomers having RVDs RN, NK, NQ, HH, KH, RH, SS and SN preferentially bind to guanine and thereby allow the generation of TALE polypeptides with high binding specificity for guanine containing target nucleic acid sequences. In an even more advantageous embodiment of the invention, polypeptide monomers having RVDs HH, KH, NH, NK, NQ, RH, RN and SS preferentially bind to guanine and thereby allow the generation of TALE polypeptides with high binding specificity for guanine containing target nucleic acid sequences. In a further advantageous embodiment, the RVDs that have high binding specificity for guanine are RN, NH RH and KH. Furthermore, polypeptide monomers having an RVD of NV preferentially bind to adenine and guanine. In more preferred embodiments of the invention, polypeptide monomers having RVDs of H*, HA, KA, N*, NA, NC, NS, RA, and S* bind to adenine, guanine, cytosine and thymine with comparable affinity.

[0262] The predetermined N-terminal to C-terminal order of the one or more polypeptide monomers of the nucleic acid or DNA binding domain determines the corresponding predetermined target nucleic acid sequence to which the TALE polypeptides will bind. As used herein the polypeptide monomers and at least one or more half polypeptide monomers are “specifically ordered to target” the genomic locus or gene of interest. In plant genomes, the natural TALE-binding sites always begin with a thymine (T), which may be specified by a cryptic signal within the non-repetitive N-terminus of the TALE polypeptide; in some cases, this region may be referred to as repeat 0. In animal genomes, TALE binding sites do not necessarily have to begin with a thymine (T) and TALE polypeptides may target DNA sequences that begin with T, A, G or C. The tandem repeat of TALE monomers always ends with a half-length repeat or a stretch of sequence that may share identity with only the first 20 amino acids of a repetitive full length TALE monomer and this half repeat may be referred to as a half-monomer (FIG. 8), which is included in the term “TALE monomer”. Therefore, it follows that the length of the nucleic acid or DNA being targeted is equal to the number of full polypeptide monomers plus two.

[0263] As described in Zhang et al., Nature Biotechnology 29:149-153 (2011), TALE polypeptide binding efficiency may be increased by including amino acid sequences from the “capping regions” that are directly N-terminal or C-terminal of the DNA binding region of naturally occurring TALEs into the engineered TALEs at positions N-terminal or C-terminal of the engineered TALE DNA binding region. Thus, in an embodiment, the TALE polypeptides described herein further comprise an N-terminal capping region and/or a C-terminal capping region.

[0264] An exemplary amino acid sequence of a N-terminal capping region is:

(SEQ ID NO: 95)
MDPIRSRTPSPARELLSGPQPDGVQPTADRGVSP
PAGGPLDGLPARRTMSRTRLPSPPAPSPAFSADS
FSDLLRQFDPSLENTSLFDSLPPFGAHHTEAATG
EWDEVQSGLRAADAPPPTMRVAVTAARPPRAKPA
PRRRAAQPSDASPAAQVDLRTLGYSQQQQEKIKP
KVRSTVAQHHEALVGHGFTHAHIVALSQHPAALG
TVAVKYQDMIAALPEATHEAIVGVGKQWSGARAL
EALLTVAGELRGPPLQLDTGQLLKIAKRGGVTAV
EAVHAWRNALTGAPLN.

[0265] An exemplary amino acid sequence of a C-terminal capping region is:

(SEQ ID NO: 96)
RPALESIVAQLSRPDPALAALTNDHLVALACLG
GRPALDAVKKGLPHAPALIKRTNRRIPERTSHR
VADHAQVVRVLGFFQCHSHPAQAFDDAMTQFGM
SRHGLLQLFRRVGVTELEARSGTLPPASQRWDR
ILQASGMKRAKPSPTSTQTPDQASLHAFADSLE
RDLDAPSPMHEGDQTRAS.

[0266] As used herein the predetermined “N-terminus” to “C terminus” orientation of the N-terminal capping region, the DNA binding domain comprising the repeat TALE monomers and the C-terminal capping region provide structural basis for the organization of different domains in the d-TALEs or polypeptides of the invention.

[0267] The entire N-terminal and/or C-terminal capping regions are not necessary to enhance the binding activity of the DNA binding region. Therefore, in an embodiment, fragments of the N-terminal and/or C-terminal capping regions are included in the TALE polypeptides described herein.

[0268] In an embodiment, the TALE polypeptides described herein contain a N-terminal capping region fragment that included at least 10, 20, 30, 40, 50, 54, 60, 70, 80, 87, 90, 94, 100, 102, 110, 117, 120, 130, 140, 147, 150, 160, 170, 180, 190, 200, 210, 220, 230, 240, 250, 260 or 270 amino acids of an N-terminal capping region. In an embodiment, the N-terminal capping region fragment amino acids are of the C-terminus (the DNA-binding region proximal end) of an N-terminal capping region. As described in Zhang et al., Nature Biotechnology 29:149-153 (2011), N-terminal capping region fragments that include the C-terminal 240 amino acids enhance binding activity equal to the full length capping region, while fragments that include the C-terminal 147 amino acids retain greater than 80% of the efficacy of the full length capping region, and fragments that include the C-terminal 117 amino acids retain greater than 50% of the activity of the full-length capping region.

[0269] In an embodiment, the TALE polypeptides described herein contain a C-terminal capping region fragment that included at least 6, 10, 20, 30, 37, 40, 50, 60, 68, 70, 80, 90, 100, 110, 120, 127, 130, 140, 150, 155, 160, 170, 180 amino acids of a C-terminal capping region. In an embodiment, the C-terminal capping region fragment amino acids are of the N-terminus (the DNA-binding region proximal end) of a C-terminal capping region. As described in Zhang et al., Nature Biotechnology 29:149-153 (2011), C-terminal capping region fragments that include the C-terminal 68 amino acids enhance binding activity equal to the full length capping region, while fragments that include the C-terminal 20 amino acids retain greater than 50% of the efficacy of the full length capping region.

[0270] In an embodiment, the capping regions of the TALE polypeptides described herein do not need to have identical sequences to the capping region sequences provided herein. Thus, in an embodiment, the capping region of the TALE polypeptides described herein have sequences that are at least 50%, 60%, 70%, 80%, 85%, 90%, 91%, 92%, 93%, 94%, 95%, 96%, 97%, 98% or 99% identical or share identity to the capping region amino acid sequences provided herein. Sequence identity is related to sequence homology. Homology comparisons may be conducted by eye, or more usually, with the aid of readily available sequence comparison programs. These commercially available computer programs may calculate percent (%) homology between two or more sequences and may also calculate the sequence identity shared by two or more amino acid or nucleic acid sequences. In some preferred embodiments, the capping region of the TALE polypeptides described herein have sequences that are at least 95% identical or share identity to the capping region amino acid sequences provided herein.

[0271] Sequence homologies may be generated by any of a number of computer programs known in the art, which include but are not limited to BLAST or FASTA. Suitable computer program for carrying out alignments like the GCG Wisconsin Bestfit package may also be used. Once the software has produced an optimal alignment, it is possible to calculate % homology, preferably % sequence identity. The software typically does this as part of the sequence comparison and generates a numerical result.

[0272] In an embodiment described herein, the TALE polypeptides of the invention include a nucleic acid binding domain linked to the one or more effector domains. The terms “effector domain” or “regulatory and functional domain” refer to a polypeptide sequence that has an activity other than binding to the nucleic acid sequence recognized by the nucleic acid binding domain. By combining a nucleic acid binding domain with one or more effector domains, the polypeptides of the invention may be used to target the one or more functions or activities mediated by the effector domain to a particular target DNA sequence to which the nucleic acid binding domain specifically binds.

[0273] In an embodiment of the TALE polypeptides described herein, the activity mediated by the effector domain is a biological activity. For example, in an embodiment the effector domain is a transcriptional inhibitor (i.e., a repressor domain), such as an mSin interaction domain (SID). SID4X domain or a Krüppel-associated box (KRAB) or fragments of the KRAB domain. In an embodiment the effector domain is an enhancer of transcription (i.e., an activation domain), such as the VP16, VP64 or p65 activation domain. In an embodiment, the nucleic acid binding is linked, for example, with an effector domain that includes but is not limited to a transposase, integrase, recombinase, resolvase, invertase, protease, DNA methyltransferase, DNA demethylase, histone acetylase, histone deacetylase, nuclease, transcriptional repressor, transcriptional activator, transcription factor recruiting, protein nuclear-localization signal or cellular uptake signal.

[0274] In an embodiment, the effector domain is a protein domain which exhibits activities which include but are not limited to transposase activity, integrase activity, recombinase activity, resolvase activity, invertase activity, protease activity, DNA methyltransferase activity, DNA demethylase activity, histone acetylase activity, histone deacetylase activity, nuclease activity, nuclear-localization signaling activity, transcriptional repressor activity, transcriptional activator activity, transcription factor recruiting activity, or cellular uptake signaling activity. Other preferred embodiments of the invention may include any combination the activities described herein.

### Zn-Finger Nucleases

[0275] In some embodiment, the nucleotide-binding molecule of the systems may be a Zn-finger nuclease, a functional fragment thereof, or a variant thereof. The composition may comprise one or more Zn-finger nucleases or nucleic acids encoding thereof. In some cases, the nucleotide sequences may comprise coding sequences for Zn-Finger nucleases. Other preferred tools for genome editing for use in the context of this invention include zinc finger systems and TALE systems. One type of programmable DNA-binding domain is provided by artificial zinc-finger (ZF) technology, which involves arrays of ZF modules to target new DNA-binding sites in the genome. Each finger module in a ZF array targets three DNA bases. A customized array of individual zinc finger domains is assembled into a ZF protein (ZFP).

[0276] ZFPs can comprise a functional domain. The first synthetic zinc finger nucleases (ZFNs) were developed by fusing a ZF protein to the catalytic domain of the Type IIS restriction enzyme FokI. (Kim, Y. G. et al., 1994, Chimeric restriction endonuclease, Proc. Natl. Acad. Sci. U.S.A. 91, 883-887; Kim, Y. G. et al., 1996, Hybrid restriction enzymes: zinc finger fusions to FokI cleavage domain. Proc. Natl. Acad. Sci. U.S.A. 93, 1156-1160). Increased cleavage specificity can be attained with decreased off target activity by use of paired ZFN heterodimers, each targeting different nucleotide sequences separated by a short spacer. (Doyon, Y. et al., 2011, Enhancing zinc-finger-nuclease activity with improved obligate heterodimeric architectures. Nat. Methods 8, 74-79). ZFPs can also be designed as transcription activators and repressors and have been used to target many genes in a wide variety of organisms. Exemplary methods of genome editing using ZFNs can be found for example in U.S. Pat. Nos. 6,534,261, 6,607,882, 6,746,838, 6,794,136, 6,824,978, 6,866,997, 6,933,113, 6,979,539, 7,013,219, 7,030,215, 7,220,719, 7,241,573, 7,241,574, 7,585,849, 7,595,376, 6,903,185, and 6,479,626, all of which are specifically incorporated by reference.

### Meganucleases

[0277] In some embodiment, the nucleotide-binding domain may be a meganuclease, a functional fragment thereof, or a variant thereof. The composition may comprise one or more meganucleases or nucleic acids encoding thereof. As disclosed herein editing can be made by way of meganucleases, which are endodeoxyribonucleases characterized by a large recognition site (double-stranded DNA sequences of 12 to 40 base pairs). In some cases, the nucleotide sequences may comprise coding sequences for meganucleases. Exemplary method for using meganucleases can be found in U.S. Pat. Nos. 8,163,514; 8,133,697; 8,021,867; 8,119,361; 8,119,381; 8,124,369; and 8,129,134, which are specifically incorporated by reference.

[0278] In an embodiment, any of the nucleases, including the modified nucleases as described herein, may be used in the methods, compositions, and kits according to the invention. In particular embodiments, nuclease activity of an unmodified nuclease may be compared with nuclease activity of any of the modified nucleases as described herein, e.g., to compare for instance off-target or on-target effects. Alternatively, nuclease activity (or a modified activity as described herein) of different modified nucleases may be compared, e.g., to compare for instance off-target or on-target effects.

### Linkers

[0279] The transposase(s) and the Cas protein(s) may be associated via a linker. The term “linker” refers to a molecule which joins the proteins to form a fusion protein. Generally, such molecules have no specific biological activity other than to join or to preserve some minimum distance or other spatial relationship between the proteins. However, in an embodiment, the linker may be selected to influence some property of the linker and/or the fusion protein such as the folding, net charge, or hydrophobicity of the linker.

[0280] Suitable linkers for use in the methods herein include straight or branched-chain carbon linkers, heterocyclic carbon linkers, or peptide linkers. However, as used herein the linker may also be a covalent bond (carbon-carbon bond or carbon-heteroatom bond). In particular embodiments, the linker is used to separate the Cas protein and the transposase by a distance sufficient to ensure that each protein retains its required functional property. A peptide linker sequences may adopt a flexible extended conformation and do not exhibit a propensity for developing an ordered secondary structure. In an embodiment, the linker can be a chemical moiety which can be monomeric, dimeric, multimeric or polymeric. Preferably, the linker comprises amino acids. Typical amino acids in flexible linkers include Gly, Asn and Ser. Accordingly, in particular embodiments, the linker comprises a combination of one or more of Gly, Asn and Ser amino acids. Other near neutral amino acids, such as Thr and Ala, also may be used in the linker sequence. Exemplary linkers are disclosed in Maratea et al. (1985), Gene 40:39-46; Murphy et al. (1986) Proc. Nat'l. Acad. Sci. USA 83:8258-62; U.S. Pat. No. 4,935,233; and 4,751,180.

[0281] For example, GlySer linkers GGS, GGGS (SEQ ID NO: 97) or GSG can be used. GGS, GSG, GGGS (SEQ ID NO: 97) or GGGGS (SEQ ID NO: 98) linkers can be used in repeats of 3 (such as (GGS)₃ (SEQ ID NO: 99), (GGGGS)₃ (SEQ ID NO: 100)) or 5, 6, 7, 9 or even 12 or more, to provide suitable lengths. In some cases, the linker may be (GGGGS)₃₋₁₅ (SEQ ID NO: 100-112), For example, in some cases, the linker may be (GGGGS)₃₋₁₁ (SEQ ID NO: 100-108), e.g., GGGGS (SEQ ID NO: 98), (GGGGS)₂ (SEQ ID NO: 113), (GGGGS)₃ (SEQ ID NO: 100), (GGGGS)₄ (SEQ ID NO: 101), (GGGGS)₅ (SEQ ID NO: 102), (GGGGS)₆ (SEQ ID NO: 103), (GGGGS)₇ (SEQ ID NO: 104), (GGGGS): (SEQ ID NO: 105), (GGGGS)₉ (SEQ ID NO: 106), (GGGGS)₁₀ (SEQ ID NO: 107), or (GGGGS)₁₁ (SEQ ID NO: 108).

[0282] In particular embodiments, linkers such as (GGGGS)₃ (SEQ ID NO: 100) are preferably used herein. (GGGGS)₆ (SEQ ID NO: 103), (GGGGS)₉ (SEQ ID NO: 106) or (GGGGS)₁₂ (SEQ ID NO: 109) may be used as alternatives. Other alternatives include (GGGGS)₁ (SEQ ID NO: 98), (GGGGS)₂ (SEQ ID NO: 113), (GGGGS)₄ (SEQ ID NO: 101), (GGGGS)₅ (SEQ ID NO: 102), (GGGGS)₇ (SEQ ID NO: 104), (GGGGS): (SEQ ID NO: 105), (GGGGS)₁₀ (SEQ ID NO: 107), or (GGGGS)₁ (SEQ ID NO: 108). In yet a further embodiment, LEPGEKPYKCPECGKSFSQSGALTRHQRTHTR (SEQ ID NO: 114) is used as a linker. In yet an additional embodiment, the linker is an XTEN linker. In particular embodiments, the Cas protein is linked to the deaminase protein or its catalytic domain by means of an LEPGEKPYKCPECGKSFSQSGALTRHQRTHTR (SEQ ID NO: 114) linker. In further particular embodiments, the Cas protein is linked C-terminally to the N-terminus of a deaminase protein or its catalytic domain by means of an LEPGEKPYKCPECGKSFSQSGALTRHQRTHTR (SEQ ID NO: 114) linker. In addition, N- and C-terminal NLSs can also function as linker (e.g., PKKKRKVEASSPKKRKVEAS (SEQ ID NO: 115)). Examples of linkers are shown in Table 1 below.

TABLE 1

| | |
|---|---|
| GGS | GGTGGTAGT |
| GGSx3 (9) | GGTGGTAGTGGAGGGAGCGGCGGTTCA (SEQ ID NO: 116) |
| (SEQ ID NO: | |
| 99) | |
| GGSx7 (21) | ggtggaggaggctctggtggaggcggtagcggaggcggagggtcgGGTGGTAGTGGAGGG |
| SEQ ID NO: | AGCGGCGGTTCA (SEQ ID NO: 118) |
| 117) | |
| XTEN | TCGGGATCTGAGACGCCTGGGACCTCGGAATCGGCTACGCCCGAA |
| | AGT (SEQ ID NO: 119) |
| Z- | Gtggataacaaatttaacaaagaaatgtgggcggcgtgggaagaaattcgtaacctgccgaacctgaacggc |
| EGFR_Short | tggcagatgaccgcgtttattgcgagcctggtggatgatccgagccagagcgcgaacctgctggcggaagcg |
| | aaaaaactgaacgatgcgcaggcgccgaaaaccggcggtggttctggt (SEQ ID NO: 120) |
| GSAT | Ggtggttctgccggtggctccggttctggctccagcggtggcagctctggtgcgtccggcacgggtactgcg |
| | ggtggcactggcagcggttccggtactggctctggc (SEQ ID NO: 121) |

[0283] Linkers may be used between the guide RNAs and the functional domain (activator or repressor), or between the Cas protein and the transposase(s). The linkers may be used to engineer appropriate amounts of “mechanical flexibility”.

[0284] In an embodiment, the one or more functional domains are controllable, e.g., inducible.

### Targeting Moieties

[0285] The systems may further comprise one or more targeting moieties. The targeting moieties may bind to specific cells or tissues, e.g., by binding to surface receptor proteins. Likewise, the following table provides exemplary targeting moieties that can be used in the practice of the invention an as to each an aspect of the invention provides a system that comprises such a targeting moiety as shown below in Table 2.

TABLE 2

| Targeting Moiety | Target Molecule | Target Cell or Tissue |
|---|---|---|
| folate | folate receptor | cancer cells |
| transferrin | transferrin receptor | cancer cells |
| Antibody CC52 | rat CC531 | rat colon adenocarcinoma CC531 |
| anti- HER2 antibody | HER2 | HER2 -overexpressing tumors |
| anti-GD2 | GD2 | neuroblastoma, melanoma |
| anti-EGFR | EGFR | tumor cells overexpressing EGFR |
| pH-dependent fusogenic | | ovarian carcinoma |
| peptide diINF-7 | | |
| anti-VEGFR | VEGF Receptor | tumor vasculature |
| anti-CD19 | CD19 (B cell marker) | leukemia, lymphoma |
| cell-penetrating peptide | | blood-brain barrier |
| cyclic arginine-glycine- | avβ3 | glioblastoma cells, human umbilical |
| aspartic acid-tyrosine- | | vein endothelial cells, tumor |
| cysteine peptide | | angiogenesis |
| (c(RGDyC)-LP (SEQ | | |
| ID NO: 1205)) | | |
| ASSHN peptide (SEQ | | endothelial progenitor cells; anti- |
| ID NO: 1206) | | cancer |
| PR_b peptide | α₅β₁ integrin | cancer cells |
| AG86 peptide | α₆β₄ integrin | cancer cells |
| KCCYSL (SEQ ID NO: | HER-2 receptor | cancer cells |
| 1207) (P6.1 peptide) | | |
| affinity peptide LN | Aminopeptidase N | APN-positive tumor |
| (YEVGHRC (SEQ ID | (APN/CD13) | |
| NO: 1208)) | | |
| synthetic somatostatin | Somatostatin receptor 2 | breast cancer |
| analogue | (SSTR2) | |
| anti-CD20 monoclonal | B-lymphocytes | B cell lymphoma |
| antibody | | |

[0286] Thus, in an embodiment of the systems, the targeting moiety comprises a receptor ligand, such as, for example, hyaluronic acid for CD44 receptor, galactose for hepatocytes, or antibody or fragment thereof such as a binding antibody fragment against a desired surface receptor, and as to each of a targeting moiety comprising a receptor ligand, or an antibody or fragment thereof such as a binding fragment thereof, such as against a desired surface receptor, there is an aspect of the invention wherein the system comprises a targeting moiety comprising a receptor ligand, or an antibody or fragment thereof such as a binding fragment thereof, such as against a desired surface receptor, or hyaluronic acid for CD44 receptor, galactose for hepatocytes (see, e.g., Surace et al, “Lipoplexes targeting the CD44 hyaluronic acid receptor for efficient transfection of breast cancer cells,” J. Mol Pharm 6(4):1062-73; doi: 10.1021/mp800215d (2009); Sonoke et al, “Galactose-modified cationic liposomes as a liver-targeting delivery system for small interfering RNA,” Biol Pharm Bull. 34(8):1338-42 (2011); Torchilin, “Antibody-modified liposomes for cancer chemotherapy,” Expert Opin. Drug Deliv. 5 (9), 1003-1025 (2008); Manjappa et al, “Antibody derivatization and conjugation strategies: application in preparation of stealth immunoliposome to target chemotherapeutics to tumor,” J. Control. Release 150 (1), 2-22 (2011); Sofou S “Antibody-targeted liposomes in cancer therapy and imaging,” Expert Opin. Drug Deliv. 5(2): 189-204 (2008); Gao J et al, “Antibody-targeted immunoliposomes for cancer treatment,” Mini. Rev. Med. Chem. 13(14): 2026-2035 (2013); Molavi et al, “Anti-CD30 antibody conjugated liposomal doxorubicin with significantly improved therapeutic efficacy against anaplastic large cell lymphoma,” Biomaterials 34(34):8718-25 (2013), each of which and the documents cited therein are hereby incorporated herein by reference).

[0287] Moreover, in view of the teachings herein the skilled artisan can readily select and apply a desired targeting moiety in the practice of the invention as to a lipid entity of the invention. The invention comprehends an embodiment wherein the system comprises a lipid entity having a targeting moiety.

### Nuclear Localization Signals

[0288] In an embodiment, the systems and compositions herein further comprise one or more nuclear localization signals (NLSs). The NLS may be capable of driving the accumulation of the components, e.g., Cas and/or transposase(s) to a desired amount in the nucleus of a cell.

[0289] In an embodiment, at least one nuclear localization signal (NLS) is attached to the Cas and/or transposase(s). In an embodiment, one or more C-terminal or N-terminal NLSs are attached (and hence nucleic acid molecule(s) coding for the Cas and/or transposase(s) can include coding for NLS(s) so that the expressed product has the NLS(s) attached or connected). In a preferred embodiment a C-terminal NLS is attached for optimal expression and nuclear targeting in eukaryotic cells, e.g., human cells. In a preferred embodiment, the NLS is attached to the N-terminus.

[0290] In one embodiment, the Cas and/or transposase(s) is fused to one or more nuclear localization sequences (NLSs), such as about or more than about 1, 2, 3, 4, 5, 6, 7, 8, 9, 10, or more NLSs. In one embodiment, the Cas and/or transposase(s) comprises about or more than about 1, 2, 3, 4, 5, 6, 7, 8, 9, 10, or more NLSs at or near the amino-terminus, about or more than about 1, 2, 3, 4, 5, 6, 7, 8, 9, 10, or more NLSs at or near the carboxy-terminus, or a combination of these (e.g. zero or at least one or more NLS at the amino-terminus and zero or at one or more NLS at the carboxy terminus). In one embodiment, an NLS is considered near the N- or C-terminus when the nearest amino acid of the NLS is within about 1, 2, 3, 4, 5, 10, 15, 20, 25, 30, 40, 50, or more amino acids along the polypeptide chain from the N- or C-terminus.

[0291] When more than one NLS is present, each may be selected independently of the others, such that a single NLS may be present in more than one copy and/or in combination with one or more other NLSs present in one or more copies. In a preferred embodiment of the invention, the nucleic acid-guided nuclease comprises at most 7 NLSs. In a preferred embodiment of the invention, the Cas5-HNH polypeptide nuclease comprises at most 7 NLSs. In example embodiments, the NLS is attached to the Cas5, Cas6, Cas7, Cas8, TniQ, TnsC, and TnsX wherein TnsX is TnsAB or TnsA and TnsB.

[0292] The NLS may be monopartite. In certain cases, the NLS may be bipartite. These types of NLSs can be further classified as either monopartite or bipartite. The two basic amino acid clusters in bipartite NLSs are separated by a short spacer sequence (e.g., about 10 amino acids), while monopartite NLSs are not. In some cases, one or more monopartite NSLs is attached to the Cas and/or transposase(s). In certain cases, one or more bipartite NSLs is attached to the Cas and/or transposase(s). In some cases, one or more monopartite NSLs and one or more bipartite NSLs are attached to the Cas and/or transposase(s).

[0293] Non-limiting examples of NLSs include an NLS sequence derived from: the NLS of the SV40 virus large T-antigen, having the amino acid sequence PKKKRKV (SEQ ID NO: 122); the NLS from nucleoplasmin (e.g., the nucleoplasmin bipartite NLS with the sequence KRPAATKKAGQAKKK (SEQ ID NO: 123)); the c-myc NLS having the amino acid sequence PAAKRVKLD (SEQ ID NO: 124) or RQRRNELKRS (SEQ ID NO: 125); the hRNPA1 M9 NLS having the sequence NQSSNFGPMKGGNFGGRSSGPYGGGGQYFAKPRNQGGY (SEQ ID NO: 126); the sequence RMRIZFKNKGKDTAELRRRRVEVSVELRKAKKDEQILKRRNV (SEQ ID NO: 127) of the IBB domain from importin-alpha; the sequences VSRKRPRP (SEQ ID NO: 128) and PPKKARED (SEQ ID NO: 129) of the myoma T protein; the sequence PQPKKKPL (SEQ ID NO: 130) of human p53; the sequence SALIKKKKKMAP (SEQ ID NO: 131) of mouse c-abl IV; the sequences DRLRR (SEQ ID NO: 132) and PKQKKRK (SEQ ID NO: 133) of the influenza virus NS1; the sequence RKLKKKIKKL (SEQ ID NO: 134) of the Hepatitis virus delta antigen; the sequence REKKKFLKRR (SEQ ID NO: 135) of the mouse Mx1 protein; the sequence KRKGDEVDGVDEVAKKKSKK (SEQ ID NO: 136) of the human poly(ADP-ribose) polymerase; and the sequence RKCLQAGMNLEARKTKK (SEQ ID NO: 137) of the steroid hormone receptors (human) glucocorticoid.

[0294] In an embodiment, a NLS is a heterologous NLS. For example, the NLS is not naturally present in the molecule (e.g., Cas and/or transposase(s)) it attached to.

[0295] In general, strength of nuclear localization activity may derive from the number of NLSs in the nucleic acid-targeting effector protein, the particular NLS(s) used, or a combination of these factors. Detection of accumulation in the nucleus may be performed by any suitable technique. For example, a detectable marker may be fused to the nucleic acid-targeting protein, such that location within a cell may be visualized, such as in combination with a means for detecting the location of the nucleus (e.g., a stain specific for the nucleus such as DAPI).

[0296] In an embodiment, a vector described herein (e.g., those comprising polynucleotides encoding Cas and/or transposase(s)) comprise one or more nuclear localization sequences (NLSs), such as about or more than about 1, 2, 3, 4, 5, 6, 7, 8, 9, 10, or more NLSs. More particularly, vector comprises one or more NLSs not naturally present in the Cas and/or transposase(s). Most particularly, the NLS is present in the vector 5′ and/or 3′ of the Cas and/or transposase(s) sequence. In an embodiment, the Cas and/or transposase(s) comprises about or more than about 1, 2, 3, 4, 5, 6, 7, 8, 9, 10, or more NLSs at or near the amino-terminus, about or more than about 1, 2, 3, 4, 5, 6, 7, 8, 9, 10, or more NLSs at or near the carboxy-terminus, or a combination of these (e.g., zero or at least one or more NLS at the amino-terminus and zero or at one or more NLS at the carboxy terminus). When more than one NLS is present, each may be selected independently of the others, such that a single NLS may be present in more than one copy and/or in combination with one or more other NLSs present in one or more copies. In an embodiment, an NLS is considered near the N- or C-terminus when the nearest amino acid of the NLS is within about 1, 2, 3, 4, 5, 10, 15, 20, 25, 30, 40, 50, or more amino acids along the polypeptide chain from the N- or C-terminus.

[0297] In an embodiment, other localization tags may be fused to the Cas and/or transposase(s), such as without limitation for localizing to particular sites in a cell, such as organelles, such mitochondria, plastids, chloroplast, vesicles, golgi, (nuclear or cellular) membranes, ribosomes, nucleolus, ER, cytoskeleton, vacuoles, centrosome, nucleosome, granules, centrioles, etc.

### Epigenetic Modifiers and Readers

[0298] Epigenetic modifiers and readers can be provided with the CAST systems. In an aspect, small molecule compounds targeting the epigenetic modifiers and readers pathways increase efficiency of the CAST system. Example small compounds target bromodomains, including BET bromodomain, CBP/p300 bromodomain, BRD2, BRD3, BRD4, BRD9, BRD7, PRC2 for inhibition. Exemplary epigenetic reader compounds are provided, for example in FIG. 12A. Epigenetic modifiers include modifiers of the histone deacetylase, histone acetyltransferase or histone demethylase pathways. Example HDAC targets for inhibitions include Class I, Class II, and Class IIa HDACs. HDAC1, HDAC2, HDAC3, HDAC4, HDAC5, HDAC6, HDAC8 and HDAC10. Histone acetyltransferases include KAT6A, BP, PCAF, GCN5, p300, Tip60, MDF, PCAF, NAT10 acetyltransferase, Gcn5p. Similarly, Histone methyltransferase pathway can be targeted, with Hmt1p, PRMT1, DOT1L, EZH1, EZH2, G9a, FLP, MLL1, SETD7, SETD8, SMYD2, PRMT5, PRMT3, PRMT6, Type I PRMTS, PRMT4, Menin-MLL, CARMI, CBX4 and CBX7 targeted for inhibition. Exemplary compounds include molecules as described in FIG. 12A-12B.

### DNA Damage Repair Enzymes

[0299] DNA damage repair enzymes, including ATM/ATR, DNA Methyltransferase, DNA-PK, DNA/RNA Synthesis pathways can be the subject of the small compounds, with target for inhibition including ATM/ATR, Mre11-Rad50-Nbs1 complex, DNMT1, DNMT3A, DNMT3B, Homology-dependent DNA repair, binder of ribosomal DNA, Mdn1, RAD51, DNA ligase, PIN1, Pol I targeted for inhibition. Exemplary compounds for use are included in FIG. 12A.

### Poly (ADP-Ribose) Polymerases (PARPs)

[0300] Poly (ADP-ribose) polymerase (PARP) pathways can be targeted by small compounds provided with the CAST IB systems, PARPs for inhibition include PARP1, PARP2, PARP3, Tankyrase 1 and Tankyrase-2, PARP14, Pim1, Pim2, PPAR-alpha, PPAR-delta, with exemplary molecules as identified in FIG. 12B.

### Heterologous Components

[0301] In an embodiment, the components in the system may be heterologous, i.e., they do not naturally occur together in the same cell or an organism. For example, one or more of: Cas protein(s), transposase(s), other functional domain(s), guide molecules, donor polynucleotides, and target sequences, may be heterologous in view of the other components in the system (i.e., they do not naturally occur together with other components of the systems in the same cell or an organism).

[0302] In some examples, the system comprises one or more heterologous guide molecules. The heterologous guide molecules may not naturally occur in the same cell or organism with Cas protein(s), transposase(s) in the system. Such a guide molecule may comprise a heterologous guide sequence, which does not naturally occur in the same molecule with the rest of the guide molecule. In some examples, the guide molecule may not occur in nature, e.g., may be artificially synthesized.

[0303] In some examples, the system may comprise one or more heterologous donor polynucleotides. The heterologous donor polynucleotides may not naturally occur in the same cell or organism with a other components in the system. Such a donor polynucleotides may comprise a heterologous insertion sequence, which does not naturally occur in the same molecule with the rest of the guide molecule. In some examples, the heterologous donor polynucleotides may not occur in nature, e.g., may be artificially synthesized.

### Chimeric Systems

[0304] In an embodiment, the systems comprise one or more Tn7 transposase is derived from a first species and the one or more Type I-B Cas proteins is derived from a second species different from the first species. In some examples, the systems have two TnsD1s, one from the first species and the other from the second species. In some examples, the systems comprise Cas5, Cas6, Cas7, Cas8, crRNA and TnsD1 from a first species and TnsD1, TnsC, TnsB, TnsA and donor polynucleotide from a second species. In some cases, the systems may further comprise Cas6 and Cas7 of the second species.

[0305] In one example, the system comprises Cas5, Cas6, Cas7, Cas8, crRNA and TnsD1 of t24 and TnsD1, TnsC, TnsB, TnsA and donor polynucleotide (and optionally Cas6 and Cas7) of IB29. In one example, the system comprises Cas5, Cas6, Cas7, Cas8, crRNA and TnsD1 of t24 and TnsD1, TnsC, TnsB, TnsA and donor polynucleotide (and optionally Cas6 and Cas7) of IB18. In one example, the system comprises Cas5, Cas6, Cas7, Cas8, crRNA and TnsD1 of IB29 and TnsD1, TnsC, TnsB, TnsA and donor polynucleotide (and optionally Cas6 and Cas7) of t24. In one example, the system comprises Cas5, Cas6, Cas7, Cas8, crRNA and TnsD1 of IB29 and TnsD1, TnsC, TnsB, TnsA and donor polynucleotide (and optionally Cas6 and Cas7) of IB18. In one example, the system comprises Cas5, Cas6, Cas7, Cas8, crRNA and TnsD1 of IB18 and TnsD1, TnsC, TnsB, TnsA and donor polynucleotide (and optionally Cas6 and Cas7) of t24. In one example, the system comprises Cas5, Cas6, Cas7, Cas8, crRNA and TnsD1 of IB18 and TnsD1, TnsC, TnsB, TnsA and donor polynucleotide (and optionally Cas6 and Cas7) of IB29.

### Polynucleotides and Vectors

[0306] The systems herein may comprise one or more polynucleotides. The polynucleotide(s) may comprise coding sequences of Cas protein(s), transposase(s), guide molecule(s), donor polynucleotide(s), or any combination thereof. The present disclosure further provides vectors or vector systems comprising one or more polynucleotides herein. The vectors or vector systems include those described in the delivery sections herein.

[0307] The terms “polynucleotide”, “nucleotide”, “nucleotide sequence”, “nucleic acid” and “oligonucleotide” are used interchangeably. They refer to a polymeric form of nucleotides of any length, either deoxyribonucleotides or ribonucleotides, or analogs thereof. Polynucleotides may have any three-dimensional structure, and may perform any function, known or unknown. The following are non-limiting examples of polynucleotides: coding or non-coding regions of a gene or gene fragment, loci (locus) defined from linkage analysis, exons, introns, messenger RNA (mRNA), transfer RNA, ribosomal RNA, short interfering RNA (siRNA), short-hairpin RNA (shRNA), micro-RNA (miRNA), ribozymes, cDNA, recombinant polynucleotides, branched polynucleotides, plasmids, vectors, isolated DNA of any sequence, isolated RNA of any sequence, nucleic acid probes, and primers. The term also encompasses nucleic-acid-like structures with synthetic backbones, see, e.g., Eckstein, 1991; Baserga et al., 1992; Milligan, 1993; WO 97/03211; WO 96/39154; Mata, 1997; Strauss-Soukup, 1997; and Samstag, 1996. A polynucleotide may comprise one or more modified nucleotides, such as methylated nucleotides and nucleotide analogs. If present, modifications to the nucleotide structure may be imparted before or after assembly of the polymer. The sequence of nucleotides may be interrupted by non-nucleotide components. A polynucleotide may be further modified after polymerization, such as by conjugation with a labeling component. As used herein the term “wild type” is a term of the art understood by skilled persons and means the typical form of an organism, strain, gene or characteristic as it occurs in nature as distinguished from mutant or variant forms. A “wild type” can be a base line. As used herein the term “variant” should be taken to mean the exhibition of qualities that have a pattern that deviates from what occurs in nature. The terms “non-naturally occurring” or “engineered” are used interchangeably and indicate the involvement of the hand of man. The terms, when referring to nucleic acid molecules or polypeptides mean that the nucleic acid molecule or the polypeptide is at least substantially free from at least one other component with which they are naturally associated in nature and as found in nature. “Complementarity” refers to the ability of a nucleic acid to form hydrogen bond(s) with another nucleic acid sequence by either traditional Watson-Crick base pairing or other non-traditional types. A percent complementarity indicates the percentage of residues in a nucleic acid molecule which can form hydrogen bonds (e.g., Watson-Crick base pairing) with a second nucleic acid sequence (e.g., 5, 6, 7, 8, 9, 10 out of 10 being 50%, 60%, 70%, 80%, 90%, and 100% complementary). “Perfectly complementary” means that all the contiguous residues of a nucleic acid sequence will hydrogen bond with the same number of contiguous residues in a second nucleic acid sequence. “Substantially complementary” as used herein refers to a degree of complementarity that is at least 60%, 65%, 70%, 75%, 80%, 85%, 90%, 95%, 97%, 98%, 99%, or 100% over a region of 8, 9, 10, 11, 12, 13, 14, 15, 16, 17, 18, 19, 20, 21, 22, 23, 24, 25, 30, 35, 40, 45, 50, or more nucleotides, or refers to two nucleic acids that hybridize under stringent conditions. As used herein, “stringent conditions” for hybridization refer to conditions under which a nucleic acid having complementarity to a target sequence predominantly hybridizes with the target sequence, and substantially does not hybridize to non-target sequences. Stringent conditions are generally sequence-dependent, and vary depending on a number of factors. In general, the longer the sequence, the higher the temperature at which the sequence specifically hybridizes to its target sequence. Non-limiting examples of stringent conditions are described in detail in Tijssen (1993), Laboratory Techniques In Biochemistry And Molecular Biology-Hybridization With Nucleic Acid Probes Part I, Second Chapter “Overview of principles of hybridization and the strategy of nucleic acid probe assay”, Elsevier, N.Y. Where reference is made to a polynucleotide sequence, then complementary or partially complementary sequences are also envisaged. These are preferably capable of hybridizing to the reference sequence under highly stringent conditions. Generally, in order to maximize the hybridization rate, relatively low-stringency hybridization conditions are selected: about 20 to 25° C. lower than the thermal melting point (Tm). The Tm is the temperature at which 50% of specific target sequence hybridizes to a perfectly complementary probe in solution at a defined ionic strength and pH. Generally, in order to require at least about 85% nucleotide complementarity of hybridized sequences, highly stringent washing conditions are selected to be about 5 to 15° C. lower than the Tm. A sequence capable of hybridizing with a given sequence is referred to as the “complement” of the given sequence.

[0308] As used herein, the term “genomic locus” or “locus” (plural loci) is the specific location of a gene or DNA sequence on a chromosome. A “gene” refers to stretches of DNA or RNA that encode a polypeptide or an RNA chain that has functional role to play in an organism and hence is the molecular unit of heredity in living organisms. It may be considered that genes include regions which regulate the production of the gene product, whether or not such regulatory sequences are adjacent to coding and/or transcribed sequences. Accordingly, a gene includes, but is not necessarily limited to, promoter sequences, terminators, translational regulatory sequences such as ribosome binding sites and internal ribosome entry sites, enhancers, silencers, insulators, boundary elements, replication origins, matrix attachment sites and locus control regions. As used herein, “expression of a genomic locus” or “gene expression” is the process by which information from a gene is used in the synthesis of a functional gene product. The products of gene expression are often proteins, but in non-protein coding genes such as rRNA genes or tRNA genes, the product is functional RNA. The process of gene expression is used by all known life-eukaryotes (including multicellular organisms), prokaryotes (bacteria and archaea) and viruses to generate functional products to survive. As used herein “expression” of a gene or nucleic acid encompasses not only cellular gene expression, but also the transcription and translation of nucleic acid(s) in cloning systems and in any other context. As used herein, “expression” also refers to the process by which a polynucleotide is transcribed from a DNA template (such as into and mRNA or other RNA transcript) and/or the process by which a transcribed mRNA is subsequently translated into peptides, polypeptides, or proteins. Transcripts and encoded polypeptides may be collectively referred to as “gene product.” If the polynucleotide is derived from genomic DNA, expression may include splicing of the mRNA in a eukaryotic cell. The terms “polypeptide”, “peptide” and “protein” are used interchangeably herein to refer to polymers of amino acids of any length. The polymer may be linear or branched, it may comprise modified amino acids, and it may be interrupted by non-amino acids. The terms also encompass an amino acid polymer that has been modified; for example, disulfide bond formation, glycosylation, lipidation, acetylation, phosphorylation, or any other manipulation, such as conjugation with a labeling component. As used herein the term “amino acid” includes natural and/or unnatural or synthetic amino acids, including glycine and both the D or L optical isomers, and amino acid analogs and peptidomimetics. As used herein, the term “domain” or “protein domain” refers to a part of a protein sequence that may exist and function independently of the rest of the protein chain. As described in aspects, sequence identity is related to sequence homology. Homology comparisons may be conducted by eye, or more usually, with the aid of readily available sequence comparison programs. These commercially available computer programs may calculate percent (%) homology between two or more sequences and may also calculate the sequence identity shared by two or more amino acid or nucleic acid sequences.

[0309] In an embodiment, the polynucleotide sequence is recombinant DNA. In further embodiments, the polynucleotide sequence further comprises additional sequences as described elsewhere herein. In an embodiment, the nucleic acid sequence is synthesized in vitro.

[0310] Aspects of the disclosure relate to polynucleotide molecules that encode one or more components of the systems as referred to in any embodiment herein. In an embodiment, the polynucleotide molecules may comprise further regulatory sequences. By means of guidance and not limitation, the polynucleotide sequence can be part of an expression plasmid, a minicircle, a lentiviral vector, a retroviral vector, an adenoviral or adeno-associated viral vector, a piggyback vector, or a tol2 vector. In an embodiment, the polynucleotide sequence may be a bicistronic expression construct. In further embodiments, the isolated polynucleotide sequence may be incorporated in a cellular genome. In yet further embodiments, the isolated polynucleotide sequence may be part of a cellular genome. In further embodiments, the isolated polynucleotide sequence may be comprised in an artificial chromosome. In an embodiment, the 5′ and/or 3′ end of the isolated polynucleotide sequence may be modified to improve the stability of the sequence of actively avoid degradation. In an embodiment, the isolated polynucleotide sequence may be comprised in a bacteriophage. In other embodiments, the isolated polynucleotide sequence may be contained in Agrobacterium species. In an embodiment, the isolated polynucleotide sequence is lyophilized.

### Codon Optimization

[0311] Aspects of the disclosure relate to polynucleotide molecules that encode one or more components of the systems as described in any of the embodiments herein, wherein at least one or more regions of the polynucleotide molecule may be codon optimized for expression in a eukaryotic cell. In an embodiment, the polynucleotide molecules that encode one or more components of the systems as described in any of the embodiments herein are optimized for expression in a mammalian cell or a plant cell.

[0312] An example of a codon optimized sequence, is in this instance a sequence optimized for expression in a eukaryote, e.g., humans (i.e. being optimized for expression in humans), or for another eukaryote, animal or mammal as herein discussed; see, e.g., SaCas9 human codon optimized sequence in International Patent Publication No. WO 2014/093622 (PCT/US2013/074667) as an example of a codon optimized sequence (from knowledge in the art and this disclosure, codon optimizing coding nucleic acid molecule(s), especially as to effector protein is within the ambit of the skilled artisan). Whilst this is preferred, it will be appreciated that other examples are possible and codon optimization for a host species other than human, or for codon optimization for specific organs is known. In an embodiment, an enzyme coding sequence encoding a Cas protein and/or transposase is codon optimized for expression in particular cells, such as eukaryotic cells. The eukaryotic cells may be those of or derived from a particular organism, such as a plant or a mammal, including but not limited to human, or non-human eukaryote or animal or mammal as herein discussed, e.g., mouse, rat, rabbit, dog, livestock, or non-human mammal or primate. In an embodiment, processes for modifying the germ line genetic identity of human beings and/or processes for modifying the genetic identity of animals which are likely to cause them suffering without any substantial medical benefit to man or animal, and also animals resulting from such processes, may be excluded. In general, codon optimization refers to a process of modifying a nucleic acid sequence for enhanced expression in the host cells of interest by replacing at least one codon (e.g., about or more than about 1, 2, 3, 4, 5, 10, 15, 20, 25, 50, or more codons) of the native sequence with codons that are more frequently or most frequently used in the genes of that host cell while maintaining the native amino acid sequence.

[0313] Various species exhibit particular bias for certain codons of a particular amino acid. Codon bias (differences in codon usage between organisms) often correlates with the efficiency of translation of messenger RNA (mRNA), which is in turn believed to be dependent on, among other things, the properties of the codons being translated and the availability of particular transfer RNA (tRNA) molecules. The predominance of selected tRNAs in a cell is generally a reflection of the codons used most frequently in peptide synthesis. Accordingly, genes can be tailored for optimal gene expression in a given organism based on codon optimization. Codon usage tables are readily available, for example, at the “Codon Usage Database” available at www.kazusa.orjp/codon/and these tables can be adapted in a number of ways. See Nakamura, Y., et al. “Codon usage tabulated from the international DNA sequence databases: status for the year 2000” Nucl. Acids Res. 28:292 (2000). Computer algorithms for codon optimizing a particular sequence for expression in a particular host cell are also available, such as Gene Forge (Aptagen; Jacobus, PA), are also available. In an embodiment, one or more codons (e.g., 1, 2, 3, 4, 5, 10, 15, 20, 25, 50, or more, or all codons) in a sequence encoding a DNA/RNA-targeting Cas protein corresponds to the most frequently used codon for a particular amino acid.

### Method of Inserting Polynucleotides

[0314] The present disclosure further provides methods of inserting a polynucleotide into a target nucleic acid in a cell, which comprises introducing into a cell: (a) one or more transposases (e.g., CRISPR-associated transposases) or functional fragments thereof, (b) a nucleotide-binding molecule. In some examples, the present disclosure provides methods of inserting a donor polynucleotide into a target polynucleotide in a cell, the method comprises introducing to the cell: one or more CRISPR-associated Tn7 transposase polypeptides or functional fragments thereof; one or more Type I-B Cas proteins; and a guide molecule capable of complexing with the Type I-B Cas protein and directing binding of the guide-Cas protein complex to a target polynucleotide.

[0315] The one or more of components (a), (b) may be expressed from a nucleic acid operably linked to a regulatory sequence that is expressed in the cell. The one or more of components (a), (b) is introduced in a particle. The particle comprises a ribonucleoprotein (RNP). The cell is a prokaryotic cell. The cell is a eukaryotic cell. The cell is a mammalian cell, a cell of a non-human primate, or a human cell. The cell is a plant cell.

[0316] In some cases, the method of inserting a donor polynucleotide into a target polynucleotide in a cell, which comprises introducing into the cell: one or more transposases (e.g., CRISPR-associated transposases), a Cas protein; and a guide molecule capable of complexing with the Cas protein and directing sequence specific binding of the guide-Cas protein complex to a target sequence of the target nucleic acid. The one or more CRISPR-associated transposons may comprise one or more transposases and a donor polynucleotide to be inserted.

### Immune Orthogonal Orthologs

[0317] In an embodiment, when one or more components of the systems (e.g., transposases, nucleotide-binding molecules) herein need to be expressed or administered in a subject, immunogenicity of the components may be reduced by sequentially expressing or administering immune orthogonal orthologs of the components of the transposon complexes to the subject. As used herein, the term “immune orthogonal orthologs” refer to orthologous proteins that have similar or substantially the same function or activity but have no or low cross-reactivity with the immune response generated by one another. In an embodiment, sequential expression or administration of such orthologs elicits low or no secondary immune response. The immune orthogonal orthologs can avoid being neutralized by antibodies (e.g., existing antibodies in the host before the orthologs are expressed or administered). Cells expressing the orthologs can avoid being cleared by the host's immune system (e.g., by activated CTLs). In some examples, CRISPR enzyme orthologs from different species may be immune orthogonal orthologs.

[0318] Immune orthogonal orthologs may be identified by analyzing the sequences, structures, and/or immunogenicity of a set of candidates orthologs. In an example method, a set of immune orthogonal orthologs may be identified by a) comparing the sequences of a set of candidate orthologs (e.g., orthologs from different species) to identify a subset of candidates that have low or no sequence similarity; b) assessing immune overlap among the members of the subset of candidates to identify candidates that have no or low immune overlap. In some cases, immune overlap among candidates may be assessed by determining the binding (e.g., affinity) between a candidate ortholog and MHC (e.g., MHC type I and/or MHC II) of the host. Alternatively, or additionally, immune overlap among candidates may be assessed by determining B-cell epitopes for the candidate orthologs. In one example, immune orthogonal orthologs may be identified using the method described in Moreno A M et al., BioRxiv, published online Jan. 10, 2018, doi: doi.org/10.1101/245985.

### Delivery

[0319] The present disclosure also provides delivery systems for introducing components of the systems and compositions herein to cells, tissues, organs, or organisms. A delivery system may comprise one or more delivery vehicles and/or cargos. Exemplary delivery systems and methods include those described in paragraphs [00117] to [00278] of Feng Zhang et al., (WO2016106236A1), and pages 1241-1251 and Table 1 of Lino C A et al., Delivering CRISPR: a review of the challenges and approaches, DRUG DELIVERY, 2018, VOL. 25, NO. 1, 1234-1257, which are incorporated by reference herein in their entireties.

[0320] In an embodiment, the delivery systems may be used to introduce the components of the systems and compositions to plant cells. For example, the components may be delivered to plant using electroporation, microinjection, aerosol beam injection of plant cell protoplasts, biolistic methods, DNA particle bombardment, and/or Agrobacterium-mediated transformation. Examples of methods and delivery systems for plants include those described in Fu et al., Transgenic Res. 2000 February; 9(1):11-9; Klein R M, et al., Biotechnology. 1992; 24:384-6; Casas A M et al., Proc Natl Acad Sci USA. 1993 Dec. 1; 90(23): 11212-11216; and U.S. Pat. No. 5,563,055, Davey M R et al., Plant Mol Biol. 1989 September; 13(3):273-85, which are incorporated by reference herein in their entireties.

### Cargos

[0321] The delivery systems may comprise one or more cargos. The cargos may comprise one or more components of the systems and compositions herein. A cargo may comprise one or more of the following: i) a plasmid encoding one or more Cas proteins; ii) a plasmid encoding one or more guide RNAs, iii) mRNA of one or more Cas proteins; iv) one or more guide RNAs; v) one or more Cas proteins; vi) any combination thereof. In some examples, a cargo may comprise a plasmid encoding one or more Cas protein and one or more (e.g., a plurality of) guide RNAs. In an embodiment, a cargo may comprise mRNA encoding one or more Cas proteins and one or more guide RNAs.

[0322] In some examples, a cargo may comprise one or more Cas proteins and one or more guide RNAs, e.g., in the form of ribonucleoprotein complexes (RNP). The ribonucleoprotein complexes may be delivered by methods and systems herein. In some cases, the ribonucleoprotein may be delivered by way of a polypeptide-based shuttle agent. In one example, the ribonucleoprotein may be delivered using synthetic peptides comprising an endosome leakage domain (ELD) operably linked to a cell penetrating domain (CPD), to a histidine-rich domain and a CPD, e.g., as describe in WO2016161516. RNP may also be used for delivering the compositions and systems to plant cells, e.g., as described in Wu J W, et al., Nat Biotechnol. 2015 November; 33(11):1162-4.

### Physical Delivery

[0323] In an embodiment, the cargos may be introduced to cells by physical delivery methods. Examples of physical methods include microinjection, electroporation, and hydrodynamic delivery. Both nucleic acid and proteins may be delivered using such methods. For example, Cas protein may be prepared in vitro, isolated, (refolded, purified if needed), and introduced to cells.

### Microinjection

[0324] Microinjection of the cargo directly to cells can achieve high efficiency, e.g., above 90% or about 100%. In an embodiment, microinjection may be performed using a microscope and a needle (e.g., with 0.5-5.0 μm in diameter) to pierce a cell membrane and deliver the cargo directly to a target site within the cell. Microinjection may be used for in vitro and ex vivo delivery.

[0325] Plasmids comprising coding sequences for Cas proteins and/or guide RNAs, mRNAs, and/or guide RNAs, may be microinjected. In some cases, microinjection may be used i) to deliver DNA directly to a cell nucleus, and/or ii) to deliver mRNA (e.g., in vitro transcribed) to a cell nucleus or cytoplasm. In certain examples, microinjection may be used to delivery sgRNA directly to the nucleus and Cas-encoding mRNA to the cytoplasm, e.g., facilitating translation and shuttling of Cas to the nucleus.

[0326] Microinjection may be used to generate genetically modified animals. For example, gene editing cargos may be injected into zygotes to allow for efficient germline modification. Such approach can yield normal embryos and full-term mouse pups harboring the desired modification(s). Microinjection can also be used to provide transiently up- or down-regulate a specific gene within the genome of a cell, e.g., using CRISPRa and CRISPRi.

### Electroporation

[0327] In an embodiment, the cargos and/or delivery vehicles may be delivered by electroporation. Electroporation may use pulsed high-voltage electrical currents to transiently open nanometer-sized pores within the cellular membrane of cells suspended in buffer, allowing for components with hydrodynamic diameters of tens of nanometers to flow into the cell. In some cases, electroporation may be used on various cell types and efficiently transfer cargo into cells. Electroporation may be used for in vitro and ex vivo delivery.

[0328] Electroporation may also be used to deliver the cargo to into the nuclei of mammalian cells by applying specific voltage and reagents, e.g., by nucleofection. Such approaches include those described in Wu Y, et al. (2015). Cell Res 25:67-79; Ye L, et al. (2014). Proc Natl Acad Sci USA 111:9591-6; Choi P S, Meyerson M. (2014). Nat Commun 5:3728; Wang J, Quake S R. (2014). Proc Natl Acad Sci 111:13157-62. Electroporation may also be used to deliver the cargo in vivo, e.g., with methods described in Zuckermann M, et al. (2015). Nat Commun 6:7391.

### Hydrodynamic Delivery

[0329] Hydrodynamic delivery may also be used for delivering the cargos, e.g., for in vivo delivery. In some examples, hydrodynamic delivery may be performed by rapidly pushing a large volume (8-10% body weight) solution containing the gene editing cargo into the bloodstream of a subject (e.g., an animal or human), e.g., for mice, via the tail vein. As blood is incompressible, the large bolus of liquid may result in an increase in hydrodynamic pressure that temporarily enhances permeability into endothelial and parenchymal cells, allowing for cargo not normally capable of crossing a cellular membrane to pass into cells. This approach may be used for delivering naked DNA plasmids and proteins. The delivered cargos may be enriched in liver, kidney, lung, muscle, and/or heart.

### Transfection

[0330] The cargos, e.g., nucleic acids, may be introduced to cells by transfection methods for introducing nucleic acids into cells. Examples of transfection methods include calcium phosphate-mediated transfection, cationic transfection, liposome transfection, dendrimer transfection, heat shock transfection, magnetofection, lipofection, impalefection, optical transfection, proprietary agent-enhanced uptake of nucleic acid.

### Delivery Vehicles

[0331] The delivery systems may comprise one or more delivery vehicles. The delivery vehicles may deliver the cargo into cells, tissues, organs, or organisms (e.g., animals or plants). The cargos may be packaged, carried, or otherwise associated with the delivery vehicles. The delivery vehicles may be selected based on the types of cargo to be delivered, and/or the delivery is in vitro and/or in vivo. Examples of delivery vehicles include vectors, viruses, non-viral vehicles, and other delivery reagents described herein.

[0332] The delivery vehicles in accordance with the present invention may a greatest dimension (e.g., diameter) of less than 100 microns (μm). In an embodiment, the delivery vehicles have a greatest dimension of less than 10 μm. In an embodiment, the delivery vehicles may have a greatest dimension of less than 2000 nanometers (nm). In an embodiment, the delivery vehicles may have a greatest dimension of less than 1000 nanometers (nm). In an embodiment, the delivery vehicles may have a greatest dimension (e.g., diameter) of less than 900 nm, less than 800 nm, less than 700 nm, less than 600 nm, less than 500 nm, less than 400 nm, less than 300 nm, less than 200 nm, less than 150 nm, or less than 100 nm, less than 50 nm. In an embodiment, the delivery vehicles may have a greatest dimension ranging between 25 nm and 200 nm.

[0333] In an embodiment, the delivery vehicles may be or comprise particles. For example, the delivery vehicle may be or comprise nanoparticles (e.g., particles with a greatest dimension (e.g., diameter) no greater than 1000 nm. The particles may be provided in different forms, e.g., as solid particles (e.g., metal such as silver, gold, iron, titanium), non-metal, lipid-based solids, polymers), suspensions of particles, or combinations thereof. Metal, dielectric, and semiconductor particles may be prepared, as well as hybrid structures (e.g., core-shell particles). Nanoparticles may also be used to deliver the compositions and systems to plant cells, e.g., as described in WO 2008042156, US20130185823, and WO2015089419.

### Vectors

[0334] The systems, compositions, and/or delivery systems may comprise one or more vectors. The present disclosure also includes vector systems. A vector system may comprise one or more vectors. In an embodiment, a vector refers to a nucleic acid molecule capable of transporting another nucleic acid to which it has been linked. Vectors include nucleic acid molecules that are single-stranded, double-stranded, or partially double-stranded; nucleic acid molecules that comprise one or more free ends, no free ends (e.g., circular); nucleic acid molecules that comprise DNA, RNA, or both; and other varieties of polynucleotides known in the art. A vector may be a plasmid, e.g., a circular double stranded DNA loop into which additional DNA segments can be inserted, such as by standard molecular cloning techniques. Certain vectors may be capable of autonomous replication in a host cell into which they are introduced (e.g., bacterial vectors having a bacterial origin of replication and episomal mammalian vectors). Some vectors (e.g., non-episomal mammalian vectors) are integrated into the genome of a host cell upon introduction into the host cell, and thereby are replicated along with the host genome. In certain examples, vectors may be expression vectors, e.g., capable of directing the expression of genes to which they are operatively-linked. In some cases, the expression vectors may be for expression in eukaryotic cells. Common expression vectors of utility in recombinant DNA techniques are often in the form of plasmids.

[0335] Examples of vectors include pGEX, pMAL, pRIT5, E. coli expression vectors (e.g., pTrc, pET 11d, yeast expression vectors (e.g., pYepSec1, pMFa, pJRY88, pYES2, and picZ, Baculovirus vectors (e.g., for expression in insect cells such as SF9 cells) (e.g., pAc series and the pVL series), mammalian expression vectors (e.g., pCDM8 and pMT2PC.

[0336] A vector may comprise i) Cas encoding sequence(s), and/or ii) a single, or at least 2, at least 3, at least 4, at least 5, at least 6, at least 7, at least 8, at least 9, at least 10, at least 12, at least 14, at least 16, at least 32, at least 48, at least 50 guide RNA(s) encoding sequences. In a single vector there can be a promoter for each RNA coding sequence. Alternatively, or additionally, in a single vector, there may be a promoter controlling (e.g., driving transcription and/or expression) multiple RNA encoding sequences.

[0337] In an embodiment, the components (or coding sequences thereof) in a composition or system herein may be comprised in a single vector. For example, a single vector may comprise coding sequences for one or more CRISPR-associated Tn7 transposase polypeptides, one or more Cas proteins, and one or more guide molecules. In an embodiment, the components (or coding sequences thereof) in a composition or system herein may be comprised in separate vectors. In some examples, a first vector may comprise coding sequences for one or more CRISPR-associated Tn7 transposase polypeptides; a second vector may comprise coding sequences for one or more Cas proteins; a third vector may comprise coding sequences for one or more guide molecules. In some examples, a first vector may comprise coding sequences for one or more CRISPR-associated Tn7 transposase polypeptides and one or more Cas proteins; a second vector may comprise coding sequences for one or more guide molecules. In some examples, a first vector may comprise coding sequences for one or more CRISPR-associated Tn7 transposase polypeptides; a second vector may comprise coding sequences for one or more Cas proteins and one or more guide molecules. In some examples, a first vector may comprise coding sequences for one or more CRISPR-associated Tn7 transposase polypeptides and one or more guide molecules; a second vector may comprise coding sequences for one or more Cas proteins.

### Regulatory Elements

[0338] A vector may comprise one or more regulatory elements. The regulatory element(s) may be operably linked to coding sequences of Cas proteins, accessary proteins, guide RNAs (e.g., a single guide RNA, crRNA, and/or tracrRNA), or combination thereof. The term “operably linked” is intended to mean that the nucleotide sequence of interest is linked to the regulatory element(s) in a manner that allows for expression of the nucleotide sequence (e.g., in an in vitro transcription/translation system or in a host cell when the vector is introduced into the host cell). In certain examples, a vector may comprise: a first regulatory element operably linked to a nucleotide sequence encoding a Cas protein, and a second regulatory element operably linked to a nucleotide sequence encoding a guide RNA.

[0339] Examples of regulatory elements include promoters, enhancers, internal ribosomal entry sites (IRES), and other expression control elements (e.g., transcription termination signals, such as polyadenylation signals and poly-U sequences). Such regulatory elements are described, for example, in Goeddel, GENE EXPRESSION TECHNOLOGY: METHODS IN ENZYMOLOGY 185, Academic Press, San Diego, Calif. (1990). Regulatory elements include those that direct constitutive expression of a nucleotide sequence in many types of host cell and those that direct expression of the nucleotide sequence only in certain host cells (e.g., tissue-specific regulatory sequences). A tissue-specific promoter may direct expression primarily in a desired tissue of interest, such as muscle, neuron, bone, skin, blood, specific organs (e.g., liver, pancreas), or particular cell types (e.g., lymphocytes). Regulatory elements may also direct expression in a temporal-dependent manner, such as in a cell-cycle dependent or developmental stage-dependent manner, which may or may not also be tissue or cell-type specific.

[0340] Examples of promoters include one or more pol III promoter (e.g., 1, 2, 3, 4, 5, or more pol III promoters), one or more pol II promoters (e.g., 1, 2, 3, 4, 5, or more pol II promoters), one or more pol I promoters (e.g., 1, 2, 3, 4, 5, or more pol I promoters), or combinations thereof. Examples of pol III promoters include, but are not limited to, U6 and H1 promoters. Examples of pol II promoters include, but are not limited to, the retroviral Rous sarcoma virus (RSV) LTR promoter (optionally with the RSV enhancer), the cytomegalovirus (CMV) promoter (optionally with the CMV enhancer), the SV40 promoter, the dihydrofolate reductase promoter, the β-actin promoter, the phosphoglycerol kinase (PGK) promoter, and the EF1α promoter.

### Viral Vectors

[0341] The cargos may be delivered by viruses. In an embodiment, viral vectors are used. A viral vector may comprise virally-derived DNA or RNA sequences for packaging into a virus (e.g., retroviruses, replication defective retroviruses, adenoviruses, replication defective adenoviruses, and adeno-associated viruses). Viral vectors also include polynucleotides carried by a virus for transfection into a host cell. Viruses and viral vectors may be used for in vitro, ex vivo, and/or in vivo deliveries.

### Adeno Associated Virus (AAV)

[0342] The systems and compositions herein may be delivered by adeno associated virus (AAV). AAV vectors may be used for such delivery. AAV, of the Dependovirus genus and Parvoviridae family, is a single stranded DNA virus. In an embodiment, AAV may provide a persistent source of the provided DNA, as AAV delivered genomic material can exist indefinitely in cells, e.g., either as exogenous DNA or, with some modification, be directly integrated into the host DNA. In an embodiment, AAV do not cause or relate with any diseases in humans. The virus itself is able to efficiently infect cells while provoking little to no innate or adaptive immune response or associated toxicity.

[0343] Examples of AAV that can be used herein include AAV-1, AAV-2, AAV-3, AAV-4, AAV-5, AAV-6, AAV-8, and AAV-9. The type of AAV may be selected with regard to the cells to be targeted; e.g., one can select AAV serotypes 1, 2, 5 or a hybrid capsid AAV1, AAV2, AAV5 or any combination thereof for targeting brain or neuronal cells; and one can select AAV4 for targeting cardiac tissue. AAV8 is useful for delivery to the liver. AAV-2-based vectors were originally proposed for CFTR delivery to CF airways, other serotypes such as AAV-1, AAV-5, AAV-6, and AAV-9 exhibit improved gene transfer efficiency in a variety of models of the lung epithelium. Examples of cell types targeted by AAV are described in Grimm, D. et al, J. Virol. 82:5887-5911 (2008)), and shown as follows:

TABLE 3

| Cell Line | AAV-1 | AAV-2 | AAV-3 | AAV-4 | AAV-5 | AAV-6 | AAV-8 | AAV-9 |
|---|---|---|---|---|---|---|---|---|
| Huh-7 | 13 | 100 | 2.5 | 0.0 | 0.1 | 10 | 0.7 | 0.0 |
| HEK293 | 25 | 100 | 2.5 | 0.1 | 0.1 | 5 | 0.7 | 0.1 |
| HeLa | 3 | 100 | 2.0 | 0.1 | 6.7 | 1 | 0.2 | 0.1 |
| HepG2 | 3 | 100 | 16.7 | 0.3 | 1.7 | 5 | 0.3 | ND |
| Hep1A | 20 | 100 | 0.2 | 1.0 | 0.1 | 1 | 0.2 | 0.0 |
| 911 | 17 | 100 | 11 | 0.2 | 0.1 | 17 | 0.1 | ND |
| CHO | 100 | 100 | 14 | 1.4 | 333 | 50 | 10 | 1.0 |
| COS | 33 | 100 | 33 | 3.3 | 5.0 | 14 | 2.0 | 0.5 |
| MeWo | 10 | 100 | 20 | 0.3 | 6.7 | 10 | 1.0 | 0.2 |
| NIH3T3 | 10 | 100 | 2.9 | 2.9 | 0.3 | 10 | 0.3 | ND |
| A549 | 14 | 100 | 20 | ND | 0.5 | 10 | 0.5 | 0.1 |
| HT1180 | 20 | 100 | 10 | 0.1 | 0.3 | 33 | 0.5 | 0.1 |
| Monocytes | 1111 | 100 | ND | ND | 125 | 1429 | ND | ND |
| Immature DC | 2500 | 100 | ND | ND | 222 | 2857 | ND | ND |
| Mature DC | 2222 | 100 | ND | ND | 333 | 3333 | ND | ND |

[0344] AAV particles may be created in HEK 293 T cells. Once particles with specific tropism have been created, they are used to infect the target cell line much in the same way that native viral particles do. This may allow for persistent presence of CRISPR-Cas components in the infected cell type, and what makes this version of delivery particularly suited to cases where long-term expression is desirable. Examples of doses and formulations for AAV that can be used include those describe in U.S. Pat. Nos. 8,454,972 and 8,404,658.

[0345] Various strategies may be used for delivery the systems and compositions herein with AAVs. In some examples, coding sequences of Cas and gRNA may be packaged directly onto one DNA plasmid vector and delivered via one AAV particle. In some examples, AAVs may be used to deliver gRNAs into cells that have been previously engineered to express Cas. In some examples, coding sequences of Cas and gRNA may be made into two separate AAV particles, which are used for co-transfection of target cells. In some examples, markers, tags, and other sequences may be packaged in the same AAV particles as coding sequences of Cas and/or gRNAs.

### Lentiviruses

[0346] The systems and compositions herein may be delivered by lentiviruses. Lentiviral vectors may be used for such delivery. Lentiviruses are complex retroviruses that have the ability to infect and express their genes in both mitotic and post-mitotic cells.

[0347] Examples of lentiviruses include human immunodeficiency virus (HIV), which may use its envelope glycoproteins of other viruses to target a broad range of cell types; minimal non-primate lentiviral vectors based on the equine infectious anemia virus (EIAV), which may be used for ocular therapies. In an embodiment, self-inactivating lentiviral vectors with an siRNA targeting a common exon shared by HIV tat/rev, a nucleolar-localizing TAR decoy, and an anti-CCR5-specific hammerhead ribozyme (see, e.g., DiGiusto et al. (2010) Sci Transl Med 2:36ra43) may be used/and or adapted to the nucleic acid-targeting system herein.

[0348] Lentiviruses may be pseudo-typed with other viral proteins, such as the G protein of vesicular stomatitis virus. In doing so, the cellular tropism of the lentiviruses can be altered to be as broad or narrow as desired. In some cases, to improve safety, second- and third-generation lentiviral systems may split essential genes across three plasmids, which may reduce the likelihood of accidental reconstitution of viable viral particles within cells.

[0349] In some examples, leveraging the integration ability, lentiviruses may be used to create libraries of cells comprising various genetic modifications, e.g., for screening and/or studying genes and signaling pathways.

### Adenoviruses

[0350] The systems and compositions herein may be delivered by adenoviruses. Adenoviral vectors may be used for such delivery. Adenoviruses include nonenveloped viruses with an icosahedral nucleocapsid containing a double stranded DNA genome. Adenoviruses may infect dividing and non-dividing cells. In an embodiment, adenoviruses do not integrate into the genome of host cells, which may be used for limiting off-target effects of CRISPR-Cas systems in gene editing applications.

### Viral Vehicles for Delivery to Plants

[0351] The systems and compositions may be delivered to plant cells using viral vehicles. In particular embodiments, the compositions and systems may be introduced in the plant cells using a plant viral vector (e.g., as described in Scholthof et al. 1996, Annu Rev Phytopathol. 1996; 34:299-323). Such viral vector may be a vector from a DNA virus, e.g., geminivirus (e.g., cabbage leaf curl virus, bean yellow dwarf virus, wheat dwarf virus, tomato leaf curl virus, maize streak virus, tobacco leaf curl virus, or tomato golden mosaic virus) or nanovirus (e.g., Faba bean necrotic yellow virus). The viral vector may be a vector from an RNA virus, e.g., tobravirus (e.g., tobacco rattle virus, tobacco mosaic virus), potexvirus (e.g., potato virus X), or hordeivirus (e.g., barley stripe mosaic virus). The replicating genomes of plant viruses may be non-integrative vectors.

### Non-Viral Vehicles

[0352] The delivery vehicles may comprise non-viral vehicles. In general, methods and vehicles capable of delivering nucleic acids and/or proteins may be used for delivering the systems compositions herein. Examples of non-viral vehicles include lipid nanoparticles, cell-penetrating peptides (CPPs), DNA nanoclews, gold nanoparticles, streptolysin O, multifunctional envelope-type nanodevices (MENDs), lipid-coated mesoporous silica particles, and other inorganic nanoparticles.

### Lipid Particles

[0353] The delivery vehicles may comprise lipid particles, e.g., lipid nanoparticles (LNPs) and liposomes.

### Lipid Nanoparticles (LNPs)

[0354] LNPs may encapsulate nucleic acids within cationic lipid particles (e.g., liposomes), and may be delivered to cells with relative ease. In some examples, lipid nanoparticles do not contain any viral components, which helps minimize safety and immunogenicity concerns. Lipid particles may be used for in vitro, ex vivo, and in vivo deliveries. Lipid particles may be used for various scales of cell populations.

[0355] In some examples. LNPs may be used for delivering DNA molecules (e.g., those comprising coding sequences of Cas and/or gRNA) and/or RNA molecules (e.g., mRNA of Cas, gRNAs). In certain cases, LNPs may be use for delivering RNP complexes of Cas/gRNA.

[0356] Components in LNPs may comprise cationic lipids 1,2-dilineoyl-3-dimethylammonium-propane (DLinDAP), 1,2-dilinoleyloxy-3-N,N-dimethylaminopropane (DLinDMA), 1,2-dilinoleyloxyketo-N, N-dimethyl-3-aminopropane (DLinK-DMA), 1,2-dilinoleyl-4-(2-dimethylaminoethyl)-[1,3]-dioxolane (DLinKC2-DMA), (3-o-[2″-(methoxypolyethyleneglycol 2000) succinoyl]-1,2-dimyristoyl-sn-glycol (PEG-S-DMG), R-3-[(ro-methoxy-poly(ethylene glycol) 2000) carbamoyl]-1,2-dimyristyloxlpropyl-3-amine (PEG-C-DOMG, and any combination thereof. Preparation of LNPs and encapsulation may be adapted from Rosin et al, Molecular Therapy, vol. 19, no. 12, pages 1286-220 December 2011).

### Liposomes

[0357] In an embodiment, a lipid particle may be liposome. Liposomes are spherical vesicle structures composed of a uni- or multilamellar lipid bilayer surrounding internal aqueous compartments and a relatively impermeable outer lipophilic phospholipid bilayer. In an embodiment, liposomes are biocompatible, nontoxic, can deliver both hydrophilic and lipophilic drug molecules, protect their cargo from degradation by plasma enzymes, and transport their load across biological membranes and the blood brain barrier (BBB).

[0358] Liposomes can be made from several different types of lipids, e.g., phospholipids. A liposome may comprise natural phospholipids and lipids such as 1,2-distearoryl-sn-glycero-3-phosphatidyl choline (DSPC), sphingomyelin, egg phosphatidylcholines, monosialoganglioside, or any combination thereof.

[0359] Several other additives may be added to liposomes in order to modify their structure and properties. For instance, liposomes may further comprise cholesterol, sphingomyelin, and/or 1,2-dioleoyl-sn-glycero-3-phosphoethanolamine (DOPE), e.g., to increase stability and/or to prevent the leakage of the liposomal inner cargo.

### Stable Nucleic-Acid-Lipid Particles (SNALPs)

[0360] In an embodiment, the lipid particles may be stable nucleic acid lipid particles (SNALPs). SNALPs may comprise an ionizable lipid (DLinDMA) (e.g., cationic at low pH), a neutral helper lipid, cholesterol, a diffusible polyethylene glycol (PEG)-lipid, or any combination thereof. In some examples, SNALPs may comprise synthetic cholesterol, dipalmitoylphosphatidylcholine, 3-N-[(w-methoxy polyethylene glycol) 2000) carbamoyl]-1,2-dimyrestyloxypropylamine, and cationic 1,2-dilinoleyloxy-3-N, Ndimethylaminopropane. In some examples, SNALPs may comprise synthetic cholesterol, 1,2-distearoyl-sn-glycero-3-phosphocholine, PEG-CDMA, and 1,2-dilinoleyloxy-3-(N;N-dimethyl)aminopropane (DLinDMA)

### Other Lipids

[0361] The lipid particles may also comprise one or more other types of lipids, e.g., cationic lipids, such as amino lipid 2,2-dilinoleyl-4-dimethylaminoethyl-[1,3]-dioxolane (DLin-KC2-DMA), DLin-KC2-DMA4, C12-200 and colipids disteroylphosphatidyl choline, cholesterol, and PEG-DMG.

### Lipoplexes/Polyplexes

[0362] In an embodiment, the delivery vehicles comprise lipoplexes and/or polyplexes. Lipoplexes may bind to negatively charged cell membrane and induce endocytosis into the cells. Examples of lipoplexes may be complexes comprising lipid(s) and non-lipid components. Examples of lipoplexes and polyplexes include FuGENE-6 reagent, a non-liposomal solution containing lipids and other components, zwitterionic amino lipids (ZALs), Ca2 [symbol] (e.g., forming DNA/Ca²⁺ microcomplexes), polyethenimine (PEI) (e.g., branched PEI), and poly(L-lysine) (PLL).

### Cell Penetrating Peptides

[0363] In an embodiment, the delivery vehicles comprise cell penetrating peptides (CPPs). CPPs are short peptides that facilitate cellular uptake of various molecular cargo (e.g., from nanosized particles to small chemical molecules and large fragments of DNA).

[0364] CPPs may be of different sizes, amino acid sequences, and charges. In some examples, CPPs can translocate the plasma membrane and facilitate the delivery of various molecular cargoes to the cytoplasm or an organelle. CPPs may be introduced into cells via different mechanisms, e.g., direct penetration in the membrane, endocytosis-mediated entry, and translocation through the formation of a transitory structure.

[0365] CPPs may have an amino acid composition that either contains a high relative abundance of positively charged amino acids such as lysine or arginine or has sequences that contain an alternating pattern of polar/charged amino acids and non-polar, hydrophobic amino acids. These two types of structures are referred to as polycationic or amphipathic, respectively. A third class of CPPs are the hydrophobic peptides, containing only apolar residues, with low net charge or have hydrophobic amino acid groups that are crucial for cellular uptake. Another type of CPPs is the trans-activating transcriptional activator (Tat) from Human Immunodeficiency Virus 1 (HIV-1). Examples of CPPs include to Penetratin, Tat (48-60), Transportan, and (R-AhX-R4) (Ahx refers to aminohexanoyl), Kaposi fibroblast growth factor (FGF) signal peptide sequence, integrin β3 signal peptide sequence, polyarginine peptide Args sequence, Guanine rich-molecular transporters, and sweet arrow peptide. Examples of CPPs and related applications also include those described in U.S. Pat. No. 8,372,951.

[0366] CPPs can be used for in vitro and ex vivo work quite readily, and extensive optimization for each cargo and cell type is usually required. In some examples, CPPs may be covalently attached to the Cas protein directly, which is then complexed with the gRNA and delivered to cells. In some examples, separate delivery of CPP-Cas and CPP-gRNA to multiple cells may be performed. CPP may also be used to delivery RNPs.

[0367] CPPs may be used to deliver the compositions and systems to plants. In some examples, CPPs may be used to deliver the components to plant protoplasts, which are then regenerated to plant cells and further to plants.

### DNA Nanoclews

[0368] In an embodiment, the delivery vehicles comprise DNA nanoclews. A DNA nanoclew refers to a sphere-like structure of DNA (e.g., with a shape of a ball of yarn). The nanoclew may be synthesized by rolling circle amplification with palindromic sequences that aide in the self-assembly of the structure. The sphere may then be loaded with a payload. An example of DNA nanoclew is described in Sun W et al, J Am Chem Soc. 2014 Oct. 22; 136(42):14722-5; and Sun W et al, Angew Chem Int Ed Engl. 2015 Oct. 5; 54(41):12029-33. DNA nanoclew may have a palindromic sequences to be partially complementary to the gRNA within the Cas:gRNA ribonucleoprotein complex. A DNA nanoclew may be coated, e.g., coated with PEI to induce endosomal escape.

### Gold Nanoparticles

[0369] In an embodiment, the delivery vehicles comprise gold nanoparticles (also referred to AuNPs or colloidal gold). Gold nanoparticles may form complex with cargos, e.g., Cas:gRNA RNP. Gold nanoparticles may be coated, e.g., coated in a silicate and an endosomal disruptive polymer, PAsp(DET). Examples of gold nanoparticles include AuraSense Therapeutics' Spherical Nucleic Acid (SNA™) constructs, and those described in Mout R, et al. (2017). ACS Nano 11:2452-8; Lee K, et al. (2017). Nat Biomed Eng 1:889-901.

iTOP

[0370] In an embodiment, the delivery vehicles comprise iTOP. iTOP refers to a combination of small molecules drives the highly efficient intracellular delivery of native proteins, independent of any transduction peptide. iTOP may be used for induced transduction by osmocytosis and propanebetaine, using NaCl-mediated hyperosmolality together with a transduction compound (propanebetaine) to trigger macropinocytotic uptake into cells of extracellular macromolecules. Examples of iTOP methods and reagents include those described in D'Astolfo D S, Pagliero R J, Pras A, et al. (2015). Cell 161:674-690.

### Polymer-Based Particles

[0371] In an embodiment, the delivery vehicles may comprise polymer-based particles (e.g., nanoparticles). In an embodiment, the polymer-based particles may mimic a viral mechanism of membrane fusion. The polymer-based particles may be a synthetic copy of Influenza virus machinery and form transfection complexes with various types of nucleic acids ((siRNA, miRNA, plasmid DNA or shRNA, mRNA) that cells take up via the endocytosis pathway, a process that involves the formation of an acidic compartment. The low pH in late endosomes acts as a chemical switch that renders the particle surface hydrophobic and facilitates membrane crossing. Once in the cytosol, the particle releases its payload for cellular action. This Active Endosome Escape technology is safe and maximizes transfection efficiency as it is using a natural uptake pathway. In an embodiment, the polymer-based particles may comprise alkylated and carboxyalkylated branched polyethylenimine. In some examples, the polymer-based particles are VIROMER, e.g., VIROMER RNAi, VIROMER RED, VIROMER mRNA, VIROMER CRISPR. Example methods of delivering the systems and compositions herein include those described in Bawage S S et al., Synthetic mRNA expressed Cas13a mitigates RNA virus infections, www.biorxiv.org/content/10.1101/370460v1.full doi: doi.org/10.1101/370460, Viromer® RED, a powerful tool for transfection of keratinocytes. doi: 10.13140/RG.2.2.16993.61281, Viromer® Transfection—Factbook 2018: technology, product overview, users' data., doi: 10.13140/RG.2.2.23912.16642.

### Streptolysin O (SLO)

[0372] The delivery vehicles may be streptolysin O (SLO). SLO is a toxin produced by Group A streptococci that works by creating pores in mammalian cell membranes. SLO may act in a reversible manner, which allows for the delivery of proteins (e.g., up to 100 kDa) to the cytosol of cells without compromising overall viability. Examples of SLO include those described in Sierig G, et al. (2003). Infect Immun 71:446-55; Walev I, et al. (2001). Proc Natl Acad Sci USA 98:3185-90; Teng K W, et al. (2017). Elife 6:e25460.

### Multifunctional Envelope-Type Nanodevice (MEND)

[0373] The delivery vehicles may comprise multifunctional envelope-type nanodevice (MENDs). MENDs may comprise condensed plasmid DNA, a PLL core, and a lipid film shell. A MEND may further comprise cell-penetrating peptide (e.g., stearyl octaarginine). The cell penetrating peptide may be in the lipid shell. The lipid envelope may be modified with one or more functional components, e.g., one or more of: polyethylene glycol (e.g., to increase vascular circulation time), ligands for targeting of specific tissues/cells, additional cell-penetrating peptides (e.g., for greater cellular delivery), lipids to enhance endosomal escape, and nuclear delivery tags. In some examples, the MEND may be a tetra-lamellar MEND (T-MEND), which may target the cellular nucleus and mitochondria. In certain examples, a MEND may be a PEG-peptide-DOPE-conjugated MEND (PPD-MEND), which may target bladder cancer cells. Examples of MENDs include those described in Kogure K, et al. (2004). J Control Release 98:317-23; Nakamura T, et al. (2012). Acc Chem Res 45:1113-21.

### Lipid-Coated Mesoporous Silica Particles

[0374] The delivery vehicles may comprise lipid-coated mesoporous silica particles. Lipid-coated mesoporous silica particles may comprise a mesoporous silica nanoparticle core and a lipid membrane shell. The silica core may have a large internal surface area, leading to high cargo loading capacities. In an embodiment, pore sizes, pore chemistry, and overall particle sizes may be modified for loading different types of cargos. The lipid coating of the particle may also be modified to maximize cargo loading, increase circulation times, and provide precise targeting and cargo release. Examples of lipid-coated mesoporous silica particles include those described in Du X, et al. (2014). Biomaterials 35:5580-90; Durfee P N, et al. (2016). ACS Nano 10:8325-45.

### Inorganic Nanoparticles

[0375] The delivery vehicles may comprise inorganic nanoparticles. Examples of inorganic nanoparticles include carbon nanotubes (CNTs) (e.g., as described in Bates K and Kostarelos K. (2013). Adv Drug Deliv Rev 65:2023-33.), bare mesoporous silica nanoparticles (MSNPs) (e.g., as described in Luo G F, et al. (2014). Sci Rep 4:6064), and dense silica nanoparticles (SiNPs) (as described in Luo D and Saltzman W M. (2000). Nat Biotechnol 18:893-5).

### Exosomes

[0376] The delivery vehicles may comprise exosomes. Exosomes include membrane bound extracellular vesicles, which can be used to contain and delivery various types of biomolecules, such as proteins, carbohydrates, lipids, and nucleic acids, and complexes thereof (e.g., RNPs). Examples of exosomes include those described in Schroeder A, et al., J Intern Med. 2010 January; 267(1):9-21; El-Andaloussi S, et al., Nat Protoc. 2012 December; 7 (12):2112-26; Uno Y, et al., Hum Gene Ther. 2011 June; 22(6):711-9; Zou W, et al., Hum Gene Ther. 2011 April; 22(4):465-75.

[0377] In some examples, the exosome may form a complex (e.g., by binding directly or indirectly) to one or more components of the cargo. In certain examples, a molecule of an exosome may be fused with first adapter protein and a component of the cargo may be fused with a second adapter protein. The first and the second adapter protein may specifically bind each other, thus associating the cargo with the exosome. Examples of such exosomes include those described in Ye Y, et al., Biomater Sci. 2020 Apr. 28. doi: 10.1039/d0bm00427h.

### Applications in General

[0378] The compositions, systems, and methods herein may be used for various applications. In general, one or more target polynucleotides may be modified using the compositions, systems, and methods. In an embodiment, the compositions, systems, and methods may be used to generate engineered cells comprising such modified polynucleotide(s). Tissues, organs, organisms, cell lines, compositions (e.g., pharmaceutical compositions), and devices comprising such engineered cell(s) may be generated as well. The engineered cells, tissues, organs, organisms, cell lines, compositions (e.g., pharmaceutical compositions), and devices may be used as a therapeutic (to treat a disease) and/or a diagnostic, produce a biological product, generate a model organism, etc. In an aspect, the engineered cells comprise modified mitochondria.

[0379] In an embodiment, biological products may be obtained from engineered cells, tissues, organs, organisms, cell lines. The biological products may be chemical compounds, nucleic acids, proteins, lipids, carbohydrates, or any combination thereof. In some examples, the biological products may be proteins. In some examples, the biological products may be RNA. In some examples, the biological products may be DNA. The proteins, RNA, and/or DNA of the biological products may be naturally occurring or non-naturally occurring, e.g., comprising one or more mutations. The product may be a mutated protein or product provided by a template.

[0380] In an embodiment, the present disclosure provides cells comprising one or more components of the systems herein. The cells may be engineered cells. The cells may be produced using the systems. The present disclosure includes cell lines comprising the engineered cell and/or progeny thereof. The present disclosure includes a plant or animal model comprising the engineered cell and/or progeny thereof. The present disclosure includes a composition comprising the engineered cell. The compositions may be formulated for us as a therapeutic. The cell or progeny thereof may be isolated (e.g., in isolated forms). The cell may comprise a mutation in a protein expressed from a gene comprising the target sequence. The cell may comprise deletion of a genomic region comprising the target sequence. The cell may comprise integration of an exogenous sequence by homology-directed repair. The cell may comprise decreased transcription of a gene associated with the target sequence. The cell may comprise increased transcription of a gene associated with the target sequence. In some cases, a donor polynucleotide may be inserted into to a target polynucleotide in a cell. The insertion of the donor polynucleotide into the target polynucleotide in the cell results in: a) a cell or population of cells comprising altered expression levels of one or more gene products; and/or b) a cell or population of cells that produces and/or secrete an endogenous or non-endogenous biological product or chemical compound.

[0381] The present disclosure includes pharmaceutical compositions for treatment of a disease or disorder, comprising the cell or progeny thereof. The treatment may result in genetic changes in one or more cells. The treatment may result in correction of one or more defective genotypes. The treatment may result in improved phenotype.

### Synthetic Biology Applications

[0382] The compositions, systems, and methods herein have a wide utility, including in clinical applications. It is envisaged that the programmable polynucleotide targeting systems can be used fused to split proteins of toxic domains for targeted cell death, for instance using cancer-linked RNA as target transcript. Further, pathways involving protein-protein interaction can be influenced in synthetic biological systems with e.g., fusion complexes with the appropriate effectors such as kinases or other enzymes.

[0383] The present disclosure expands the reach of synthetic biology by targeting specific diagnostic and therapeutic applications through improvements in genetic circuitry and higher level genetic circuit delivery enhancements.

[0384] Provided herein are methods and compositions having industrial, clinical, and other technological utility. Like all engineering-oriented disciplines, provided herein are modularized, flexible platforms that can be tuned for diverse applications. The highly modular and programmable nature of the compositions, systems, and methods herein can be used as a platform technology in synthetic biology. For example, in alternative embodiments, split enzymes are fused to Cas proteins whose activity is reconstituted upon binding to a target polynucleotide such as complementation of split death-inducing proteins after detection of a cancer-linked RNA or DNA. In alternative embodiments, pathways involving successive protein/protein interactions are re-engineered by using RNA or DNA to scaffold interactions among exemplary Cas fusion proteins as provided herein. In alternative embodiments, scaffold proteins as provided herein can bind kinases and their substrates to strongly influence the output of a signaling pathway, and exemplary Cas polypeptides are used in the scaffolding of protein/protein interactions to control signaling in a gene expression-dependent manner. Another group used tethering of enzymes involved in the production of the drug precursor mevalonate, thereby increasing production of this small molecule (Dueber J E, Wu G C, Malmirchegini G R, Moon T S, et al. 2009. Synthetic protein scaffolds provide modular control over metabolic flux. Nat Biotechnol 27:753-9). In principle, strong co-binding of exemplary Cas fusion proteins on a target RNA provides a new level of control over successive protein interactions or shuttling of metabolites.

[0385] The emerging field of synthetic biology has produced toolbox of genetic regulatory systems that can be applied in basic research and for therapeutic applications. Synthetic biology strategies can create opportunities to change basic research approaches and improve therapeutic treatments for treating injuries and diseases. The complexity of cell signaling networks can be simplified by considering genetic networks composed of subsets of simpler parts, or modules. This simplification is the foundation of synthetic biology, where engineering paradigms are applied in rational and systematic ways to produce predictable and robust systems for understanding or controlling cellular function. This approach entails reprogramming cells to perform in predictable ways. Towards this end, genetic circuits have been built out of DNA and RNA that enable cells to perform Boolean logic functions ranging from memory, and mathematical computations to higher-order cellular functions like cancer cell identification, controlling T cell populations, and reporting on the microenvironment. The engineered gene circuits underlying these functions include genetic switches, oscillators, digital logic gates, and cell counters and have been designed to regulate gene expression in dynamic and predictable ways. While the majority of work in synthetic biology has been in simple organisms such as yeast and bacteria, however, the therapeutic potential of cells carrying engineered genetic circuits has spurred interest in using synthetic biology to remediate or control human disease. This is in part based upon the premise that effective cell therapies require precise temporal and spatial regulation of gene expression, which can be easily controlled by using genetic circuits.

[0386] Approaches in synthetic biology as disclosed herein can be used to reprogram cells with genetic circuits to probe the CNS during the onset and progression of neurodegenerative diseases. Such an approach will enable a better understanding of the interactions between neuroinflammation and neurodegeneration that will have a major impact on the broad range of neurological disorders.

### Applications in Plants and Fungi

[0387] The compositions, systems, and methods described herein can be used to perform gene or genome interrogation or editing or manipulation in plants and fungi. For example, the applications include investigation and/or selection and/or interrogations and/or comparison and/or manipulations and/or transformation of plant genes or genomes; e.g., to create, identify, develop, optimize, or confer trait(s) or characteristic(s) to plant(s) or to transform a plant or fungus genome. There can accordingly be improved production of plants, new plants with new combinations of traits or characteristics or new plants with enhanced traits. The compositions, systems, and methods can be used with regard to plants in Site-Directed Integration (SDI) or Gene Editing (GE) or any Near Reverse Breeding (NRB) or Reverse Breeding (RB) techniques.

[0388] The compositions, systems, and methods herein may be used to confer desired traits (e.g., enhanced nutritional quality, increased resistance to diseases and resistance to biotic and abiotic stress, and increased production of commercially valuable plant products or heterologous compounds) on essentially any plants and fungi, and their cells and tissues. The compositions, systems, and methods may be used to modify endogenous genes or to modify their expression without the permanent introduction into the genome of any foreign gene.

[0389] In an embodiment, compositions, systems, and methods may be used in genome editing in plants or where RNAi or similar genome editing techniques have been used previously; see, e.g., Nekrasov, “Plant genome editing made easy: targeted mutagenesis in model and crop plants using the CRISPR-Cas system,” Plant Methods 2013, 9:39 (doi: 10.1186/1746-4811-9-39); Brooks, “Efficient gene editing in tomato in the first generation using the CRISPR-Cas9 system,” Plant Physiology September 2014 pp 114247577; Shan, “Targeted genome modification of crop plants using a CRISPR-Cas system,” Nature Biotechnology 31, 686-688 (2013); Feng, “Efficient genome editing in plants using a CRISPR/Cas system,” Cell Research (2013) 23:1229-1232. doi: 10.1038/cr.2013.114; published online 20 Aug. 2013; Xie, “RNA-guided genome editing in plants using a CRISPR-Cas system,” Mol Plant. 2013 November; 6(6):1975-83. doi: 10.1093/mp/sst119. Epub 2013 Aug. 17; Xu, “Gene targeting using the Agrobacterium tumefaciens-mediated CRISPR-Cas system in rice,” Rice 2014, 7:5 (2014), Zhou et al., “Exploiting SNPs for biallelic CRISPR mutations in the outcrossing woody perennial Populus reveals 4-coumarate: CoA ligase specificity and Redundancy,” New Phytologist (2015) (Forum) 1-4 (available online only at www.newphytologist.com); Caliando et al, “Targeted DNA degradation using a CRISPR device stably carried in the host genome, NATURE COMMUNICATIONS 6:6989, DOI: 10.1038/ncomms7989, www.nature.com/naturecommunications DOI: 10.1038/ncomms7989; U.S. Pat. No. 6,603,061—Agrobacterium-Mediated Plant Transformation Method; U.S. Pat. No. 7,868,149—Plant Genome Sequences and Uses Thereof and US 2009/0100536-Transgenic Plants with Enhanced Agronomic Traits, Morrell et al “Crop genomics: advances and applications,” Nat Rev Genet. 2011 Dec. 29; 13(2):85-96, all the contents and disclosure of each of which are herein incorporated by reference in their entirety. Aspects of utilizing the compositions, systems, and methods may be analogous to the use of the CRISPR-Cas (e.g., CRISPR-Cas9) system in plants, and mention is made of the University of Arizona website “CRISPR-PLANT” (www.genome.arizona.edu/crispr/) (supported by Penn State and AGI).

[0390] The compositions, systems, and methods may also be used on protoplasts. A “protoplast” refers to a plant cell that has had its protective cell wall completely or partially removed using, for example, mechanical or enzymatic means resulting in an intact biochemical competent unit of living plant that can reform their cell wall, proliferate and regenerate grow into a whole plant under proper growing conditions.

[0391] The compositions, systems, and methods may be used for screening genes (e.g., endogenous, mutations) of interest. In some examples, genes of interest include those encoding enzymes involved in the production of a component of added nutritional value or generally genes affecting agronomic traits of interest, across species, phyla, and plant kingdom. By selectively targeting e.g., genes encoding enzymes of metabolic pathways, the genes responsible for certain nutritional aspects of a plant can be identified. Similarly, by selectively targeting genes which may affect a desirable agronomic trait, the relevant genes can be identified. Accordingly, the present invention encompasses screening methods for genes encoding enzymes involved in the production of compounds with a particular nutritional value and/or agronomic traits.

[0392] It is also understood that reference herein to animal cells may also apply, mutatis mutandis, to plant or fungal cells unless otherwise apparent; and the enzymes herein having reduced off-target effects and systems employing such enzymes can be used in plant applications, including those mentioned herein.

[0393] In some cases, nucleic acids introduced to plants and fungi may be codon optimized for expression in the plants and fungi. Methods of codon optimization include those described in Kwon K C, et al., Codon Optimization to Enhance Expression Yields Insights into Chloroplast Translation, Plant Physiol. 2016 September; 172(1):62-77.

[0394] The components (e.g., Cas proteins) in the compositions and systems may further comprise one or more functional domains described herein. In some examples, the functional domains may be an exonuclease. Such exonuclease may increase the efficiency of the Cas proteins' function, e.g., mutagenesis efficiency. An example of the functional domain is Trex2, as described in Weiss T et al., www.biorxiv.org/content/10.1101/2020.04.11.037572v1, doi: doi.org/10.1101/2020.04.11.037572.

### Examples of Plants

[0395] The compositions, systems, and methods herein can be used to confer desired traits on essentially any plant. A wide variety of plants and plant cell systems may be engineered for the desired physiological and agronomic characteristics. In general, the term “plant” relates to any various photosynthetic, eukaryotic, unicellular or multicellular organism of the kingdom Plantae characteristically growing by cell division, containing chloroplasts, and having cell walls comprised of cellulose. The term plant encompasses monocotyledonous and dicotyledonous plants.

[0396] The compositions, systems, and methods may be used over a broad range of plants, such as for example with dicotyledonous plants belonging to the orders Magniolales, Illiciales, Laurales, Piperales, Aristochiales, Nymphaeales, Ranunculales, Papeverales, Sarraceniaceae, Trochodendrales, Hamamelidales, Eucomiales, Leitneriales, Myricales, Fagales, Casuarinales, Caryophyllales, Batales, Polygonales, Plumbaginales, Dilleniales, Theales, Malvales, Urticales, Lecythidales, Violales, Salicales, Capparales, Ericales, Diapensales, Ebenales, Primulales, Rosales, Fabales, Podostemales, Haloragales, Myrtales, Cornales, Proteales, San tales, Rafflesiales, Celastrales, Euphorbiales, Rhamnales, Sapindales, Juglandales, Geraniales, Polygalales, Umbellales, Gentianales, Polemoniales, Lamiales, Plantaginales, Scrophulariales, Campanulales, Rubiales, Dipsacales, and Asterales; monocotyledonous plants such as those belonging to the orders Alismatales, Hydrocharitales, Najadales, Triuridales, Commelinales, Eriocaulales, Restionales, Poales, Juncales, Cyperales, Typhales, Bromeliales, Zingiberales, Arecales, Cyclanthales, Pandanales, Arales, Lilliales, and Orchid ales, or with plants belonging to Gymnospermae, e.g. those belonging to the orders Pinales, Ginkgoales, Cycadales, Araucariales, Cupressales and Gnetales.

[0397] The compositions, systems, and methods herein can be used over a broad range of plant species, included in the non-limitative list of dicot, monocot or gymnosperm genera hereunder: Atropa, Alseodaphne, Anacardium, Arachis, Beilschmiedia, Brassica, Carthamus, Cocculus, Croton, Cucumis, Citrus, Citrullus, Capsicum, Catharanthus, Cocos, Coffea, Cucurbita, Daucus, Duguetia, Eschscholzia, Ficus, Fragaria, Glaucium, Glycine, Gossypium, Helianthus, Hevea, Hyoscyamus, Lactuca, Landolphia, Linum, Litsea, Lycopersicon, Lupinus, Manihot, Majorana, Malus, Medicago, Nicotiana, Olea, Parthenium, Papaver, Persea, Phaseolus, Pistacia, Pisum, Pyrus, Prunus, Raphanus, Ricinus, Senecio, Sinomenium, Stephania, Sinapis, Solanum, Theobroma, Trifolium, Trigonella, Vicia, Vinca, Vilis, and Vigna; and the genera Allium, Andropogon, Aragrostis, Asparagus, Avena, Cynodon, Elaeis, Festuca, Festulolium, Heterocallis, Hordeum, Lemna, Lolium, Musa, Oryza, Panicum, Pannesetum, Phleum, Poa, Secale, Sorghum, Triticum, Zea, Abies, Cunninghamia, Ephedra, Picea, Pinus, and Pseudotsuga.

[0398] In an embodiment, target plants and plant cells for engineering include those monocotyledonous and dicotyledonous plants, such as crops including grain crops (e.g., wheat, maize, rice, millet, barley), fruit crops (e.g., tomato, apple, pear, strawberry, orange), forage crops (e.g., alfalfa), root vegetable crops (e.g., carrot, potato, sugar beets, yam), leafy vegetable crops (e.g., lettuce, spinach); flowering plants (e.g., petunia, rose, chrysanthemum), conifers and pine trees (e.g., pine fir, spruce); plants used in phytoremediation (e.g., heavy metal accumulating plants); oil crops (e.g., sunflower, rape seed) and plants used for experimental purposes (e.g., Arabidopsis). Specifically, the plants are intended to comprise without limitation angiosperm and gymnosperm plants such as acacia, alfalfa, amaranth, apple, apricot, artichoke, ash tree, asparagus, avocado, banana, barley, beans, beet, birch, beech, blackberry, blueberry, broccoli, Brussel's sprouts, cabbage, canola, cantaloupe, carrot, cassava, cauliflower, cedar, a cereal, celery, chestnut, cherry, Chinese cabbage, citrus, clementine, clover, coffee, corn, cotton, cowpea, cucumber, cypress, eggplant, elm, endive, eucalyptus, fennel, figs, fir, geranium, grape, grapefruit, groundnuts, ground cherry, gum hemlock, hickory, kale, kiwifruit, kohlrabi, larch, lettuce, leek, lemon, lime, locust, pine, maidenhair, maize, mango, maple, melon, millet, mushroom, mustard, nuts, oak, oats, oil palm, okra, onion, orange, an ornamental plant or flower or tree, papaya, palm, parsley, parsnip, pea, peach, peanut, pear, peat, pepper, persimmon, pigeon pea, pine, pineapple, plantain, plum, pomegranate, potato, pumpkin, radicchio, radish, rapeseed, raspberry, rice, rye, sorghum, safflower, sallow, soybean, spinach, spruce, squash, strawberry, sugar beet, sugarcane, sunflower, sweet potato, sweet corn, tangerine, tea, tobacco, tomato, trees, triticale, turf grasses, turnips, vine, walnut, watercress, watermelon, wheat, yams, yew, and zucchini.

[0399] The term plant also encompasses Algae, which are mainly photoautotrophs unified primarily by their lack of roots, leaves and other organs that characterize higher plants. The compositions, systems, and methods can be used over a broad range of “algae” or “algae cells.” Examples of algae include eukaryotic phyla, including the Rhodophyta (red algae), Chlorophyta (green algae), Phaeophyta (brown algae), Bacillariophyta (diatoms), Eustigmatophyta and dinoflagellates as well as the prokaryotic phylum Cyanobacteria (blue-green algae). Examples of algae species include those of Amphora, Anabaena, Anikstrodesmis, Botryococcus, Chaetoceros, Chlamydomonas, Chlorella, Chlorococcum, Cyclotella, Cylindrotheca, Dunaliella, Emiliana, Euglena, Hematococcus, Isochrysis, Monochrysis, Monoraphidium, Nannochloris, Nannnochloropsis, Navicula, Nephrochloris, Nephroselmis, Nitzschia, Nodularia, Nostoc, Oochromonas, Oocystis, Oscillartoria, Pavlova, Phaeodactylum, Playtmonas, Pleurochrysis, Porhyra, Pseudoanabaena, Pyramimonas, Stichococcus, Synechococcus, Synechocystis, Tetraselmis, Thalassiosira, and Trichodesmium.

### Plant Promoters

[0400] In order to ensure appropriate expression in a plant cell, the components of the components and systems herein may be placed under control of a plant promoter. A plant promoter is a promoter operable in plant cells. A plant promoter is capable of initiating transcription in plant cells, whether or not its origin is a plant cell. The use of different types of promoters is envisaged.

[0401] In some examples, the plant promoter is a constitutive plant promoter, which is a promoter that is able to express the open reading frame (ORF) that it controls in all or nearly all of the plant tissues during all or nearly all developmental stages of the plant (referred to as “constitutive expression”). One example of a constitutive promoter is the cauliflower mosaic virus 35S promoter. In some examples, the plant promoter is a regulated promoter, which directs gene expression not constitutively, but in a temporally- and/or spatially-regulated manner, and includes tissue-specific, tissue-preferred and inducible promoters. Different promoters may direct the expression of a gene in different tissues or cell types, or at different stages of development, or in response to different environmental conditions. In some examples, the plant promoter is a tissue-preferred promoters, which can be utilized to target enhanced expression in certain cell types within a particular plant tissue, for instance vascular cells in leaves or roots or in specific cells of the seed.

[0402] Exemplary plant promoters include those obtained from plants, plant viruses, and bacteria such as Agrobacterium or Rhizobium which comprise genes expressed in plant cells. Additional examples of promoters include those described in Kawamata et al., (1997) Plant Cell Physiol 38:792-803; Yamamoto et al., (1997) Plant J 12:255-65; Hire et al, (1992) Plant Mol Biol 20:207-18, Kuster et al, (1995) Plant Mol Biol 29:759-72, and Capana et al., (1994) Plant Mol Biol 25:681-91.

[0403] In some examples, a plant promoter may be an inducible promoter, which is inducible and allows for spatiotemporal control of gene editing or gene expression may use a form of energy. The form of energy may include sound energy, electromagnetic radiation, chemical energy and/or thermal energy. Examples of inducible systems include tetracycline inducible promoters (Tet-On or Tet-Off), small molecule two-hybrid transcription activations systems (FKBP, ABA, etc), or light inducible systems (Phytochrome, LOV domains, or cryptochrome), such as a Light Inducible Transcriptional Effector (LITE) that direct changes in transcriptional activity in a sequence-specific manner. In a particular example, of the components of a light inducible system include a Cas protein, a light-responsive cytochrome heterodimer (e.g., from Arabidopsis thaliana), and a transcriptional activation/repression domain.

[0404] In some examples, the promoter may be a chemical-regulated promotor (where the application of an exogenous chemical induces gene expression) or a chemical-repressible promoter (where application of the chemical represses gene expression). Examples of chemical-inducible promoters include maize ln2-2 promoter (activated by benzene sulfonamide herbicide safeners), the maize GST promoter (activated by hydrophobic electrophilic compounds used as pre-emergent herbicides), the tobacco PR-1 a promoter (activated by salicylic acid), promoters regulated by antibiotics (such as tetracycline-inducible and tetracycline-repressible promoters).

### Stable Integration in the Genome of Plants

[0405] In an embodiment, polynucleotides encoding the components of the compositions and systems may be introduced for stable integration into the genome of a plant cell. In some cases, vectors or expression systems may be used for such integration. The design of the vector or the expression system can be adjusted depending on for when, where and under what conditions the guide RNA and/or the Cas gene are expressed. In some cases, the polynucleotides may be integrated into an organelle of a plant, such as a plastid, mitochondrion or a chloroplast. The elements of the expression system may be on one or more expression constructs which are either circular such as a plasmid or transformation vector, or non-circular such as linear double stranded DNA.

[0406] In an embodiment, the method of integration generally comprises the steps of selecting a suitable host cell or host tissue, introducing the construct(s) into the host cell or host tissue, and regenerating plant cells or plants therefrom. In some examples, the expression system for stable integration into the genome of a plant cell may contain one or more of the following elements: a promoter element that can be used to express the RNA and/or Cas enzyme in a plant cell; a 5′ untranslated region to enhance expression; an intron element to further enhance expression in certain cells, such as monocot cells; a multiple-cloning site to provide convenient restriction sites for inserting the guide RNA and/or the Cas gene sequences and other desired elements; and a 3′ untranslated region to provide for efficient termination of the expressed transcript.

### Transient Expression in Plants

[0407] In an embodiment, the components of the compositions and systems may be transiently expressed in the plant cell. In some examples, the compositions and systems may modify a target nucleic acid only when both the guide RNA and the Cas protein are present in a cell, such that genomic modification can further be controlled. As the expression of the Cas protein is transient, plants regenerated from such plant cells typically contain no foreign DNA. In certain examples, the Cas protein is stably expressed and the guide sequence is transiently expressed.

[0408] DNA and/or RNA (e.g., mRNA) may be introduced to plant cells for transient expression. In such cases, the introduced nucleic acid may be provided in sufficient quantity to modify the cell but do not persist after a contemplated period of time has passed or after one or more cell divisions.

[0409] The transient expression may be achieved using suitable vectors. Exemplary vectors that may be used for transient expression include a pEAQ vector (may be tailored for Agrobacterium-mediated transient expression) and Cabbage Leaf Curl virus (CaLCuV), and vectors described in Sainsbury F. et al., Plant Biotechnol J. 2009 September; 7(7):682-93; and Yin K et al., Scientific Reports volume 5, Article number: 14926 (2015).

[0410] Combinations of the different methods described above are also envisaged.

Translocation to and/or Expression in Specific Plant Organelles

[0411] The compositions and systems herein may comprise elements for translocation to and/or expression in a specific plant organelle.

### Chloroplast Targeting

[0412] In an embodiment, it is envisaged that the compositions and systems are used to specifically modify chloroplast genes or to ensure expression in the chloroplast. The compositions and systems (e.g., Cas proteins, guide molecules, or their encoding polynucleotides) may be transformed, compartmentalized, and/or targeted to the chloroplast. In an example, the introduction of genetic modifications in the plastid genome can reduce biosafety issues such as gene flow through pollen.

[0413] Examples of methods of chloroplast transformation include Particle bombardment, PEG treatment, and microinjection, and the translocation of transformation cassettes from the nuclear genome to the plastid. In some examples, targeting of chloroplasts may be achieved by incorporating in chloroplast localization sequence, and/or the expression construct a sequence encoding a chloroplast transit peptide (CTP) or plastid transit peptide, operably linked to the 5′ region of the sequence encoding the components of the compositions and systems. Additional examples of transforming, targeting and localization of chloroplasts include those described in WO2010061186, Protein Transport into Chloroplasts, 2010, Annual Review of Plant Biology, Vol. 61:157-180, and US20040142476, which are incorporated by reference herein in their entireties.

### Exemplary Applications in Plants

[0414] The compositions, systems, and methods may be used to generate genetic variation(s) in a plant (e.g., crop) of interest. One or more, e.g., a library of, guide molecules targeting one or more locations in a genome may be provided and introduced into plant cells together with the Cas effector protein. For example, a collection of genome-scale point mutations and gene knock-outs can be generated. In some examples, the compositions, systems, and methods may be used to generate a plant part or plant from the cells so obtained and screening the cells for a trait of interest. The target genes may include both coding and non-coding regions. In some cases, the trait is stress tolerant and the method is a method for the generation of stress-tolerant crop varieties.

[0415] In an embodiment, the compositions, systems, and methods are used to modify endogenous genes or to modify their expression. The expression of the components may induce targeted modification of the genome, either by direct activity of the Cas nuclease and optionally introduction of template DNA, or by modification of genes targeted. The different strategies described herein above allow Cas-mediated targeted genome editing without requiring the introduction of the components into the plant genome.

[0416] In some cases, the modification may be performed without the permanent introduction into the genome of the plant of any foreign gene, including those encoding CRISPR components, so as to avoid the presence of foreign DNA in the genome of the plant. This can be of interest as the regulatory requirements for non-transgenic plants are less rigorous. Components which are transiently introduced into the plant cell are typically removed upon crossing.

[0417] For example, the modification may be performed by transient expression of the components of the compositions and systems. The transient expression may be performed by delivering the components of the compositions and systems with viral vectors, delivery into protoplasts, with the aid of particulate molecules such as nanoparticles or CPPs.

Generation of Plants with Desired Traits

[0418] The compositions, systems, and methods herein may be used to introduce desired traits to plants. The approaches include introduction of one or more foreign genes to confer a trait of interest, editing or modulating endogenous genes to confer a trait of interest.

### Agronomic Traits

[0419] In an embodiment, crop plants can be improved by influencing specific plant traits. Examples of the traits include improved agronomic traits such as herbicide resistance, disease resistance, abiotic stress tolerance, high yield, and superior quality, pesticide-resistance, disease resistance, insect and nematode resistance, resistance against parasitic weeds, drought tolerance, nutritional value, stress tolerance, self-pollination voidance, forage digestibility biomass, and grain yield.

[0420] In an embodiment, genes that confer resistance to pests or diseases may be introduced to plants. In cases there are endogenous genes that confer such resistance in plants, their expression and function may be enhanced (e.g., by introducing extra copies, modifications that enhance expression and/or activity).

[0421] Examples of genes that confer resistance include plant disease resistance genes (e.g., Cf-9, Pto, RSP2, SIDMR6-1), genes conferring resistance to a pest (e.g., those described in WO96/30517), Bacillus thuringiensis proteins, lectins, Vitamin-binding proteins (e.g., avidin), enzyme inhibitors (e.g., protease or proteinase inhibitors or amylase inhibitors), insect-specific hormones or pheromones (e.g., ecdysteroid or a juvenile hormone, variant thereof, a mimetic based thereon, or an antagonist or agonist thereof) or genes involved in the production and regulation of such hormone and pheromones, insect-specific peptides or neuropeptide, Insect-specific venom (e.g., produced by a snake, a wasp, etc., or analog thereof), Enzymes responsible for a hyperaccumulation of a monoterpene, a sesquiterpene, a steroid, hydroxamic acid, a phenylpropanoid derivative or another nonprotein molecule with insecticidal activity, Enzymes involved in the modification of biologically active molecule (e.g., a glycolytic enzyme, a proteolytic enzyme, a lipolytic enzyme, a nuclease, a cyclase, a transaminase, an esterase, a hydrolase, a phosphatase, a kinase, a phosphorylase, a polymerase, an elastase, a chitinase and a glucanase, whether natural or synthetic), molecules that stimulates signal transduction, Viral-invasive proteins or a complex toxin derived therefrom, Developmental-arrestive proteins produced in nature by a pathogen or a parasite, a developmental-arrestive protein produced in nature by a plant, or any combination thereof.

[0422] The compositions, systems, and methods may be used to identify, screen, introduce or remove mutations or sequences lead to genetic variability that give rise to susceptibility to certain pathogens, e.g., host specific pathogens. Such approach may generate plants that are non-host resistance, e.g., the host and pathogen are incompatible or there can be partial resistance against all races of a pathogen, typically controlled by many genes and/or also complete resistance to some races of a pathogen but not to other races.

[0423] In an embodiment, compositions, systems, and methods may be used to modify genes involved in plant diseases. Such genes may be removed, inactivated, or otherwise regulated or modified. Examples of plant diseases include those described in [0045]-[0080] of US20140213619A1, which is incorporated by reference herein in its entirety.

[0424] In an embodiment, genes that confer resistance to herbicides may be introduced to plants. Examples of genes that confer resistance to herbicides include genes conferring resistance to herbicides that inhibit the growing point or meristem, such as an imidazolinone or a sulfonylurea, genes conferring glyphosate tolerance (e.g., resistance conferred by, e.g., mutant 5-enolpyruvylshikimate-3-phosphate synthase genes, aroA genes and glyphosate acetyl transferase (GAT) genes, respectively), or resistance to other phosphono compounds such as by glufosinate (phosphinothricin acetyl transferase (PAT) genes from Streptomyces species, including Streptomyces hygroscopicus and Streptomyces viridichromogenes), and to pyridinoxy or phenoxy proprionic acids and cyclohexones by ACCase inhibitor-encoding genes), genes conferring resistance to herbicides that inhibit photosynthesis (such as a triazine (psbA and gs+ genes) or a benzonitrile (nitrilase gene), and glutathione S-transferase), genes encoding enzymes detoxifying the herbicide or a mutant glutamine synthase enzyme that is resistant to Inhibition, genes encoding a detoxifying enzyme is an enzyme encoding a phosphinothricin acetyltransferase (such as the bar or pat protein from Streptomyces species), genes encoding hydroxyphenylpyruvatedioxygenases (HPPD) inhibitors, e.g., naturally occurring HPPD resistant enzymes, and genes encoding a mutated or chimeric HPPD enzyme.

[0425] In an embodiment, genes involved in Abiotic stress tolerance may be introduced to plants. Examples of genes include those capable of reducing the expression and/or the activity of poly(ADP-ribose) polymerase (PARP) gene, transgenes capable of reducing the expression and/or the activity of the PARG encoding genes, genes coding for a plant-functional enzyme of the nicotineamide adenine dinucleotide salvage synthesis pathway including nicotinamidase, nicotinate phosphoribosyltransferase, nicotinic acid mononucleotide adenyl transferase, nicotinamide adenine dinucleotide synthetase or nicotine amide phosphorybosyltransferase, enzymes involved in carbohydrate biosynthesis, enzymes involved in the production of polyfructose (e.g., the inulin and levan-type), the production of alpha-1,6 branched alpha-1,4-glucans, the production of alternan, the production of hyaluronan.

[0426] In an embodiment, genes that improve drought resistance may be introduced to plants. Examples of genes Ubiquitin Protein Ligase protein (UPL) protein (UPL3), DR02, DR03, ABC transporter, and DREB1A.

### Nutritionally Improved Plants

[0427] In an embodiment, the compositions, systems, and methods may be used to produce nutritionally improved plants. In some examples, such plants may provide functional foods, e.g., a modified food or food ingredient that may provide a health benefit beyond the traditional nutrients it contains. In certain examples, such plants may provide nutraceuticals foods, e.g., substances that may be considered a food or part of a food and provides health benefits, including the prevention and treatment of disease. The nutraceutical foods may be useful in the prevention and/or treatment of diseases in animals and humans, e.g., cancers, diabetes, cardiovascular disease, and hypertension.

[0428] An improved plant may naturally produce one or more desired compounds and the modification may enhance the level or activity or quality of the compounds. In some cases, the improved plant may not naturally produce the compound(s), while the modification enables the plant to produce such compound(s). In some cases, the compositions, systems, and methods used to modify the endogenous synthesis of these compounds indirectly, e.g., by modifying one or more transcription factors that controls the metabolism of this compound.

[0429] Examples of nutritionally improved plants include plants comprising modified protein quality, content and/or amino acid composition, essential amino acid contents, oils and fatty acids, carbohydrates, vitamins and carotenoids, functional secondary metabolites, and minerals. In some examples, the improved plants may comprise or produce compounds with health benefits. Examples of nutritionally improved plants include those described in Newell-McGloughlin, Plant Physiology, July 2008, Vol. 147, pp. 939-953.

[0430] Examples of compounds that can be produced include carotenoids (e.g., α-Carotene or β-Carotene), lutein, lycopene, Zeaxanthin, Dietary fiber (e.g., insoluble fibers, β-Glucan, soluble fibers, fatty acids (e.g., @-3 fatty acids, Conjugated linoleic acid, GLA,), Flavonoids (e.g., Hydroxycinnamates, flavonols, catechins and tannins), Glucosinolates, indoles, isothiocyanates (e.g., Sulforaphane), Phenolics (e.g., stilbenes, caffeic acid and ferulic acid, epicatechin), Plant stanols/sterols, Fructans, inulins, fructo-oligosaccharides, Saponins, Soybean proteins, Phytoestrogens (e.g., isoflavones, lignans), Sulfides and thiols such as diallyl sulphide, Allyl methyl trisulfide, dithiolthiones, Tannins, such as proanthocyanidins, or any combination thereof.

[0431] The compositions, systems, and methods may also be used to modify protein/starch functionality, shelf life, taste/aesthetics, fiber quality, and allergen, antinutrient, and toxin reduction traits.

[0432] Examples of genes and nucleic acids that can be modified to introduce the traits include stearyl-ACP desaturase, DNA associated with the single allele which may be responsible for maize mutants characterized by low levels of phytic acid, Tf RAP2.2 and its interacting partner SINAT2, Tf Dof1, and DOF Tf AtDof1.1 (OBP2).

### Modification of Polyploid Plants

[0433] The compositions, systems, and methods may be used to modify polyploid plants. Polyploid plants carry duplicate copies of their genomes (e.g., as many as six, such as in wheat). In some cases, the compositions, systems, and methods can be multiplexed to affect all copies of a gene, or to target dozens of genes at once. For instance, the compositions, systems, and methods may be used to simultaneously ensure a loss of function mutation in different genes responsible for suppressing defenses against a disease. The modification may be simultaneous suppression the expression of the TaMLO-Al, TaMLO-Bl and TaMLO-Dl nucleic acid sequence in a wheat plant cell and regenerating a wheat plant therefrom, in order to ensure that the wheat plant is resistant to powdery mildew (e.g., as described in WO2015109752).

### Regulation of Fruit-Ripening

[0434] The compositions, systems, and methods may be used to regulate ripening of fruits. Ripening is a normal phase in the maturation process of fruits and vegetables. Only a few days after it starts it may render a fruit or vegetable inedible, which can bring significant losses to both farmers and consumers.

[0435] In an embodiment, the compositions, systems, and methods are used to reduce ethylene production. In some examples, the compositions, systems, and methods may be used to suppress the expression and/or activity of ACC synthase, insert an ACC deaminase gene or a functional fragment thereof, insert a SAM hydrolase gene or functional fragment thereof, suppress ACC oxidase gene expression.

[0436] Alternatively or additionally, the compositions, systems, and methods may be used to modify ethylene receptors (e.g., suppressing ETR1) and/or Polygalacturonase (PG). Suppression of a gene may be achieved by introducing a mutation, an antisense sequence, and/or a truncated copy of the gene to the genome.

### Increasing Storage Life of Plants

[0437] In an embodiment, the compositions, systems, and methods are used to modify genes involved in the production of compounds which affect storage life of the plant or plant part. The modification may be in a gene that prevents the accumulation of reducing sugars in potato tubers. Upon high-temperature processing, these reducing sugars react with free amino acids, resulting in brown, bitter-tasting products and elevated levels of acrylamide, which is a potential carcinogen. In particular embodiments, the methods provided herein are used to reduce or inhibit expression of the vacuolar invertase gene (VInv), which encodes a protein that breaks down sucrose to glucose and fructose.

### Reducing Allergens in Plants

[0438] In an embodiment, the compositions, systems, and methods are used to generate plants with a reduced level of allergens, making them safer for consumers. To this end, the compositions, systems, and methods may be used to identify and modify (e.g., suppress) one or more genes responsible for the production of plant allergens. Examples of such genes include Lol p5, as well as those in peanuts, soybeans, lentils, peas, lupin, green beans, mung beans, such as those described in Nicolaou et al., Current Opinion in Allergy and Clinical Immunology 2011; 11(3):222), which is incorporated by reference herein in its entirety.

### Generation of Male Sterile Plants

[0439] The compositions, systems, and methods may be used to generate male sterile plants. Hybrid plants typically have advantageous agronomic traits compared to inbred plants. However, for self-pollinating plants, the generation of hybrids can be challenging. In different plant types (e.g., maize and rice), genes have been identified which are important for plant fertility, more particularly male fertility. Plants that are as such genetically altered can be used in hybrid breeding programs.

[0440] The compositions, systems, and methods may be used to modify genes involved male fertility, e.g., inactivating (such as by introducing mutations to) genes required for male fertility. Examples of the genes involved in male fertility include cytochrome P450-like gene (MS26) or the meganuclease gene (MS45), and those described in Wan X et al., Mol Plant. 2019 Mar. 4; 12(3):321-342; and Kim Y J, et al., Trends Plant Sci. 2018 January; 23(1):53-65.

### Increasing the Fertility Stage in Plants

[0441] In an embodiment, the compositions, systems, and methods may be used to prolong the fertility stage of a plant such as of a rice. For instance, a rice fertility stage gene such as Ehd3 can be targeted in order to generate a mutation in the gene and plantlets can be selected for a prolonged regeneration plant fertility stage.

### Production of Early Yield of Products

[0442] In an embodiment, the compositions, systems, and methods may be used to produce early yield of the product. For example, flowering process may be modulated, e.g., by mutating flowering repressor gene such as SP5G. Examples of such approaches include those described in Soyk S, et al., Nat Genet. 2017 January; 49(1):162-168.

### Oil and Biofuel Production

[0443] The compositions, systems, and methods may be used to generate plants for oil and biofuel production. Biofuels include fuels made from plant and plant-derived resources. Biofuels may be extracted from organic matter whose energy has been obtained through a process of carbon fixation or are made through the use or conversion of biomass. This biomass can be used directly for biofuels or can be converted to convenient energy containing substances by thermal conversion, chemical conversion, and biochemical conversion. This biomass conversion can result in fuel in solid, liquid, or gas form. Biofuels include bioethanol and biodiesel. Bioethanol can be produced by the sugar fermentation process of cellulose (starch), which may be derived from maize and sugar cane. Biodiesel can be produced from oil crops such as rapeseed, palm, and soybean. Biofuels can be used for transportation.

### Generation of Plants for Production of Vegetable Oils and Biofuels

[0444] The compositions, systems, and methods may be used to generate algae (e.g., diatom) and other plants (e.g., grapes) that express or overexpress high levels of oil or biofuels.

[0445] In some cases, the compositions, systems, and methods may be used to modify genes involved in the modification of the quantity of lipids and/or the quality of the lipids. Examples of such genes include those involved in the pathways of fatty acid synthesis, e.g., acetyl-CoA carboxylase, fatty acid synthase, 3-ketoacyl_acyl-carrier protein synthase III, glycerol-3-phospate dehydrogenase (G3PDH), Enoyl-acyl carrier protein reductase (Enoyl-ACP-reductase), glycerol-3-phosphate acyltransferase, lysophosphatidic acyl transferase or diacylglycerol acyltransferase, phospholipid: diacylglycerol acyltransferase, phoshatidate phosphatase, fatty acid thioesterase such as palmitoyl protein thioesterase, or malic enzyme activities.

[0446] In further embodiments it is envisaged to generate diatoms that have increased lipid accumulation. This can be achieved by targeting genes that decrease lipid catabolization. Examples of genes include those involved in the activation of triacylglycerol and free fatty acids, β-oxidation of fatty acids, such as genes of acyl-CoA synthetase, 3-ketoacyl-CoA thiolase, acyl-CoA oxidase activity and phosphoglucomutase.

[0447] In some examples, algae may be modified for production of oil and biofuels, including fatty acids (e.g., fatty esters such as acid methyl esters (FAME) and fatty acid ethyl esters (FAEE)). Examples of methods of modifying microalgae include those described in Stovicek et al. Metab. Eng. Comm., 2015; 2:1; U.S. Pat. No. 8,945,839; and WO 2015086795.

[0448] In some examples, one or more genes may be introduced (e.g., overexpressed) to the plants (e.g., algae) to produce oils and biofuels (e.g., fatty acids) from a carbon source (e.g., alcohol). Examples of the genes include genes encoding acyl-CoA synthases, ester synthases, thioesterases (e.g., tesA, ‘tesA, tesB, fatB, fatB2, fatB3, fatAl, or fatA), acyl-CoA synthases (e.g., fadD, JadK, BH3103, pfl-4354, EAV15023, fadDI, fadD2, RPC_4074, fadDD35, fadDD22, faa39), ester synthases (e.g., synthase/acyl-CoA:diacylglycerl acyltransferase from Simmondsia chinensis, Acinetobacter sp. ADP, Alcanivorax borkumensis, Pseudomonas aeruginosa, Fundibacter jadensis, Arabidopsis thaliana, or Alkaligenes eutrophus, or variants thereof).

[0449] Additionally, or alternatively, one or more genes in the plants (e.g., algae) may be inactivated (e.g., expression of the genes is decreased). For examples, one or more mutations may be introduced to the genes. Examples of such genes include genes encoding acyl-CoA dehydrogenases (e.g., fade), outer membrane protein receptors, and transcriptional regulator (e.g., repressor) of fatty acid biosynthesis (e.g., fabR), pyruvate formate lyases (e.g., pflB), lactate dehydrogenases (e.g., IdhA).

### Organic Acid Production

[0450] In an embodiment, plants may be modified to produce organic acids such as lactic acid. The plants may produce organic acids using sugars, pentose or hexose sugars. To this end, one or more genes may be introduced (e.g., and overexpressed) in the plants. An example of such genes includes LDH gene.

[0451] In some examples, one or more genes may be inactivated (e.g., expression of the genes is decreased). For examples, one or more mutations may be introduced to the genes. The genes may include those encoding proteins involved an endogenous metabolic pathway which produces a metabolite other than the organic acid of interest and/or wherein the endogenous metabolic pathway consumes the organic acid.

[0452] Examples of genes that can be modified or introduced include those encoding pyruvate decarboxylases (pdc), fumarate reductases, alcohol dehydrogenases (adh), acetaldehyde dehydrogenases, phosphoenolpyruvate carboxylases (ppc), D-lactate dehydrogenases (d-ldh), L-lactate dehydrogenases (l-ldh), lactate 2-monooxygenases, lactate dehydrogenase, cytochrome-dependent lactate dehydrogenases (e.g., cytochrome B2-dependent L-lactate dehydrogenases).

### Enhancing Plant Properties for Biofuel Production

[0453] In an embodiment, the compositions, systems, and methods are used to alter the properties of the cell wall of plants to facilitate access by key hydrolyzing agents for a more efficient release of sugars for fermentation. By reducing the proportion of lignin in a plant the proportion of cellulose can be increased. In particular embodiments, lignin biosynthesis may be downregulated in the plant so as to increase fermentable carbohydrates.

[0454] In some examples, one or more lignin biosynthesis genes may be down regulated. Examples of such genes include 4-coumarate 3-hydroxylases (C3H), phenylalanine ammonia-lyases (PAL), cinnamate 4-hydroxylases (C4H), hydroxycinnamoyl transferases (HCT), caffeic acid O-methyltransferases (COMT), caffeoyl CoA 3-O-methyltransferases (CCoAOMT), ferulate 5-hydroxylases (F5H), cinnamyl alcohol dehydrogenases (CAD), cinnamoyl CoA-reductases (CCR), 4-coumarate-CoA ligases (4CL), monolignol-lignin-specific glycosyltransferases, and aldehyde dehydrogenases (ALDH), and those described in WO 2008064289.

[0455] In some examples, plant mass that produces lower level of acetic acid during fermentation may be reduced. To this end, genes involved in polysaccharide acetylation (e.g., Cas1L and those described in WO 2010096488) may be inactivated.

### Other Microorganisms for Oils and Biofuel Production

[0456] In an embodiment, microorganisms other than plants may be used for production of oils and biofuels using the compositions, systems, and methods herein. Examples of the microorganisms include those of the genus of Escherichia, Bacillus, Lactobacillus, Rhodococcus, Synechococcus, Synechoystis, Pseudomonas, Aspergillus, Trichoderma, Neurospora, Fusarium, Humicola, Rhizomucor, Kluyveromyces, Pichia, Mucor, Myceliophtora, Penicillium, Phanerochaete, Pleurotus, Trametes, Chrysosporium, Saccharomyces, Stenotrophamonas, Schizosaccharomyces, Yarrowia, or Streptomyces.

### Plant Cultures and Regeneration

[0457] In an embodiment, the modified plants or plant cells may be cultured to regenerate a whole plant which possesses the transformed or modified genotype and thus the desired phenotype. Examples of regeneration techniques include those relying on manipulation of certain phytohormones in a tissue culture growth medium, relying on a biocide and/or herbicide marker which has been introduced together with the desired nucleotide sequences, obtaining from cultured protoplasts, plant callus, explants, organs, pollens, embryos or parts thereof.

### Detecting Modifications in the Plant Genome-Selectable Markers

[0458] When the compositions, systems, and methods are used to modify a plant, suitable methods may be used to confirm and detect the modification made in the plant. In some examples, when a variety of modifications are made, one or more desired modifications or traits resulting from the modifications may be selected and detected. The detection and confirmation may be performed by biochemical and molecular biology techniques such as Southern analysis, PCR, Northern blot, S1 RNase protection, primer-extension or reverse transcriptase-PCR, enzymatic assays, ribozyme activity, gel electrophoresis, Western blot, immunoprecipitation, enzyme-linked immunoassays, in situ hybridization, enzyme staining, and immunostaining.

[0459] In some cases, one or more markers, such as selectable and detectable markers, may be introduced to the plants. Such markers may be used for selecting, monitoring, isolating cells and plants with desired modifications and traits. A selectable marker can confer positive or negative selection and is conditional or non-conditional on the presence of external substrates. Examples of such markers include genes and proteins that confer resistance to antibiotics, such as hygromycin (hpt) and kanamycin (nptII), and genes that confer resistance to herbicides, such as phosphinothricin (bar) and chlorosulfuron (als), enzyme capable of producing or processing a colored substances (e.g., the β-glucuronidase, luciferase, B or Cl genes).

### Applications in Fungi

[0460] The compositions, systems, and methods described herein can be used to perform efficient and cost-effective gene or genome interrogation or editing or manipulation in fungi or fungal cells, such as yeast. The approaches and applications in plants may be applied to fungi as well.

[0461] A fungal cell may be any type of eukaryotic cell within the kingdom of fungi, such as phyla of Ascomycota, Basidiomycota, Blastocladiomycota, Chytridiomycota, Glomeromycota, Microsporidia, and Neocallimastigomycota. Examples of fungi or fungal cells in include yeasts, molds, and filamentous fungi.

[0462] In an embodiment, the fungal cell is a yeast cell. A yeast cell refers to any fungal cell within the phyla Ascomycota and Basidiomycota. Examples of yeasts include budding yeast, fission yeast, and mold, S. cerervisiae, Kluyveromyces marxianus, Issatchenkia orientalis, Candida spp. (e.g., Candida albicans), Yarrowia spp. (e.g., Yarrowia lipolytica), Pichia spp. (e.g., Pichia pastoris), Kluyveromyces spp. (e.g., Kluyveromyces lactis and Kluyveromyces marxianus), Neurospora spp. (e.g., Neurospora crassa), Fusarium spp. (e.g., Fusarium oxysporum), and Issatchenkia spp. (e.g., Issatchenkia orientalis, Pichia kudriavzevii and Candida acidothermophilum).

[0463] In an embodiment, the fungal cell is a filamentous fungal cell, which grow in filaments, e.g., hyphae or mycelia. Examples of filamentous fungal cells include Aspergillus spp. (e.g., Aspergillus niger), Trichoderma spp. (e.g., Trichoderma reesei), Rhizopus spp. (e.g., Rhizopus oryzae), and Mortierella spp. (e.g., Mortierella isabellina).

[0464] In an embodiment, the fungal cell is of an industrial strain. Industrial strains include any strain of fungal cell used in or isolated from an industrial process, e.g., production of a product on a commercial or industrial scale. Industrial strain may refer to a fungal species that is typically used in an industrial process, or it may refer to an isolate of a fungal species that may be also used for non-industrial purposes (e.g., laboratory research). Examples of industrial processes include fermentation (e.g., in production of food or beverage products), distillation, biofuel production, production of a compound, and production of a polypeptide. Examples of industrial strains include, without limitation, JAY270 and ATCC4124.

[0465] In an embodiment, the fungal cell is a polyploid cell whose genome is present in more than one copy. Polyploid cells include cells naturally found in a polyploid state, and cells that has been induced to exist in a polyploid state (e.g., through specific regulation, alteration, inactivation, activation, or modification of meiosis, cytokinesis, or DNA replication). A polyploid cell may be a cell whose entire genome is polyploid, or a cell that is polyploid in a particular genomic locus of interest. In some examples, the abundance of guide RNA may more often be a rate-limiting component in genome engineering of polyploid cells than in haploid cells, and thus the methods using the CRISPR system described herein may take advantage of using certain fungal cell types.

[0466] In an embodiment, the fungal cell is a diploid cell, whose genome is present in two copies. Diploid cells include cells naturally found in a diploid state, and cells that have been induced to exist in a diploid state (e.g., through specific regulation, alteration, inactivation, activation, or modification of meiosis, cytokinesis, or DNA replication). A diploid cell may refer to a cell whose entire genome is diploid, or it may refer to a cell that is diploid in a particular genomic locus of interest.

[0467] In an embodiment, the fungal cell is a haploid cell, whose genome is present in one copy. Haploid cells include cells naturally found in a haploid state, or cells that have been induced to exist in a haploid state (e.g., through specific regulation, alteration, inactivation, activation, or modification of meiosis, cytokinesis, or DNA replication). A haploid cell may refer to a cell whose entire genome is haploid, or it may refer to a cell that is haploid in a particular genomic locus of interest.

[0468] The compositions and systems, and nucleic acid encoding thereof, may be introduced to fungi cells using the delivery systems and methods herein. Examples of delivery systems include lithium acetate treatment, bombardment, electroporation, and those described in Kawai et al., 2010, Bioeng Bugs. 2010 November-December; 1(6): 395-403.

[0469] In some examples, a yeast expression vector (e.g., those with one or more regulatory elements) may be used. Examples of such vectors include a centromeric (CEN) sequence, an autonomous replication sequence (ARS), a promoter, such as an RNA Polymerase III promoter, operably linked to a sequence or gene of interest, a terminator such as an RNA polymerase III terminator, an origin of replication, and a marker gene (e.g., auxotrophic, antibiotic, or other selectable markers). Examples of expression vectors for use in yeast may include plasmids, yeast artificial chromosomes, 2μ plasmids, yeast integrative plasmids, yeast replicative plasmids, shuttle vectors, and episomal plasmids.

### Biofuel and Materials Production by Fungi

[0470] In an embodiment, the compositions, systems, and methods may be used for generating modified fungi for biofuel and material productions. For instance, the modified fungi for production of biofuel or biopolymers from fermentable sugars and optionally to be able to degrade plant-derived lignocellulose derived from agricultural waste as a source of fermentable sugars. Foreign genes required for biofuel production and synthesis may be introduced into fungi In some examples, the genes may encode enzymes involved in the conversion of pyruvate to ethanol or another product of interest, degrade cellulose (e.g., cellulase), endogenous metabolic pathways which compete with the biofuel production pathway.

[0471] In some examples, the compositions, systems, and methods may be used for generating and/or selecting yeast strains with improved xylose or cellobiose utilization, isoprenoid biosynthesis, and/or lactic acid production. One or more genes involved in the metabolism and synthesis of these compounds may be modified and/or introduced to yeast cells. Examples of the methods and genes include lactate dehydrogenase, PDC1 and PDC5, and those described in Ha, S. J., et al. (2011) Proc. Natl. Acad. Sci. USA 108(2):504-9 and Galazka, J. M., et al. (2010) Science 330(6000):84-6; Jakočiūnas T et al., Metab Eng. 2015 March; 28:213-222; Stovicek V, et al., FEMS Yeast Res. 2017 Aug. 1; 17(5).

### Improved Plants and Yeast Cells

[0472] The present disclosure further provides improved plants and fungi. The improved and fungi may comprise one or more genes introduced, and/or one or more genes modified by the compositions, systems, and methods herein. The improved plants and fungi may have increased food or feed production (e.g., higher protein, carbohydrate, nutrient or vitamin levels), oil and biofuel production (e.g., methanol, ethanol), tolerance to pests, herbicides, drought, low or high temperatures, excessive water, etc.

[0473] The plants or fungi may have one or more parts that are improved, e.g., leaves, stems, roots, tubers, seeds, endosperm, ovule, and pollen. The parts may be viable, nonviable, regeneratable, and/or non-regeneratable.

[0474] The improved plants and fungi may include gametes, seeds, embryos, either zygotic or somatic, progeny and/or hybrids of improved plants and fungi. The progeny may be a clone of the produced plant or fungi or may result from sexual reproduction by crossing with other individuals of the same species to introgress further desirable traits into their offspring. The cell may be in vivo or ex vivo in the cases of multicellular organisms, particularly plants.

### Further Applications of the CRISPR-Cas System in Plants

[0475] Further applications of the compositions, systems, and methods on plants and fungi include visualization of genetic element dynamics (e.g., as described in Chen B, et al., Cell. 2013 Dec. 19; 155(7):1479-91), targeted gene disruption positive-selection in vitro and in vivo (as described in Malina A et al., Genes Dev. 2013 Dec. 1; 27(23):2602-14), epigenetic modification such as using fusion of Cas and histone-modifying enzymes (e.g., as described in Rusk N, Nat Methods. 2014 January; 11(1):28), identifying transcription regulators (e.g., as described in Waldrip Z J, Epigenetics. 2014 September; 9(9):1207-11), anti-virus treatment for both RNA and DNA viruses (e.g., as described in Price A A, et al., Proc Natl Acad Sci USA. 2015 May 12; 112(19):6164-9; Ramanan V et al., Sci Rep. 2015 Jun. 2; 5:10833), alteration of genome complexity such as chromosome numbers (e.g., as described in Karimi-Ashtiyani R et al., Proc Natl Acad Sci USA. 2015 Sep. 8; 112(36):11211-6; Anton T, et al., Nucleus. 2014 March-April; 5(2):163-72), self-cleavage of the CRISPR system for controlled inactivation/activation (e.g., as described Sugano S S et al., Plant Cell Physiol. 2014 March; 55(3):475-81), multiplexed gene editing (as described in Kabadi A M et al., Nucleic Acids Res. 2014 Oct. 29; 42(19):e147), development of kits for multiplex genome editing (as described in Xing H L et al., BMC Plant Biol. 2014 Nov. 29; 14:327), starch production (as described in Hebelstrup K H et al., Front Plant Sci. 2015 Apr. 23; 6:247), targeting multiple genes in a family or pathway (e.g., as described in Ma X et al., Mol Plant. 2015 August; 8(8):1274-84), regulation of non-coding genes and sequences (e.g., as described in Lowder L G, et al., Plant Physiol. 2015 October; 169(2):971-85), editing genes in trees (e.g., as described in Belhaj K et al., Plant Methods. 2013 Oct. 11; 9(1):39; Harrison M M, et al., Genes Dev. 2014 Sep. 1; 28(17):1859-72; Zhou X et al., New Phytol. 2015 October; 208(2):298-301), introduction of mutations for resistance to host-specific pathogens and pests.

[0476] Additional examples of modifications of plants and fungi that may be performed using the compositions, systems, and methods include those described in International Patent Publication Nos. WO2016/099887, WO2016/025131, WO2016/073433, WO2017/066175, WO2017/100158, WO 2017/105991, WO2017/106414, WO2016/100272, WO2016/100571, WO 2016/100568, WO 2016/100562, and WO 2017/019867.

### Applications in Non-Human Animals

[0477] The compositions, systems, and methods may be used to study and modify non-human animals, e.g., introducing desirable traits and disease resilience, treating diseases, facilitating breeding, etc. In an embodiment, the compositions, systems, and methods may be used to improve breeding and introducing desired traits, e.g., increasing the frequency of trait-associated alleles, introgression of alleles from other breeds/species without linkage drag, and creation of de novo favorable alleles. Genes and other genetic elements that can be targeted may be screened and identified. Examples of application and approaches include those described in Tait-Burkard C, et al., Livestock 2.0—genome editing for fitter, healthier, and more productive farmed animals. Genome Biol. 2018 Nov. 26; 19(1):204; Lillico S, Agricultural applications of genome editing in farmed animals. Transgenic Res. 2019 August; 28 (Suppl 2):57-60; Houston R D, et al., Harnessing genomics to fast-track genetic improvement in aquaculture. Nat Rev Genet. 2020 Apr. 16. doi: 10.1038/s41576-020-0227-y, which are incorporated herein by reference in their entireties. Applications described in other sections such as therapeutic, diagnostic, etc. can also be used on the animals herein.

[0478] The compositions, systems, and methods may be used on animals such as fish, amphibians, reptiles, mammals, and birds. The animals may be farm and agriculture animals, or pets. Examples of farm and agriculture animals include horses, goats, sheep, swine, cattle, llamas, alpacas, and birds, e.g., chickens, turkeys, ducks, and geese. The animals may be a non-human primate, e.g., baboons, capuchin monkeys, chimpanzees, lemurs, macaques, marmosets, tamarins, spider monkeys, squirrel monkeys, and vervet monkeys. Examples of pets include dogs, cats, horses, wolfs, rabbits, ferrets, gerbils, hamsters, chinchillas, fancy rats, guinea pigs, canaries, parakeets, and parrots.

[0479] In an embodiment, one or more genes may be introduced (e.g., overexpressed) in the animals to obtain or enhance one or more desired traits. Growth hormones, insulin-like growth factors (IGF-1) may be introduced to increase the growth of the animals, e.g., pigs or salmon (such as described in Pursel V G et al., J Reprod Fertil Suppl. 1990; 40:235-45; Waltz E, Nature. 2017; 548:148). Fat-1 gene (e.g., from C elegans) may be introduced for production of larger ratio of n−3 to n−6 fatty acids may be induced, e.g., in pigs (such as described in Li M, et al., Genetics. 2018; 8:1747-54). Phytase (e.g., from E coli) xylanase (e.g., from Aspergillus niger), beta-glucanase (e.g., from Bacillus lichenformis) may be introduced to reduce the environmental impact through phosphorous and nitrogen release reduction, e.g., in pigs (such as described in Golovan S P, et al., Nat Biotechnol. 2001; 19:741-5; Zhang X et al., elife. 2018). shRNA decoy may be introduced to induce avian influenza resilience e.g., in chicken (such as described in Lyall et al., Science. 2011; 331:223-6). Lysozyme or lysostaphin may be introduced to induce mastitis resilience e.g., in goat and cow (such as described in Maga E A et al., Foodborne Pathog Dis. 2006; 3:384-92; Wall R J, et al., Nat Biotechnol. 2005; 23:445-51). Histone deacetylase such as HDAC6 may be introduced to induce PRRSV resilience, e.g., in pig (such as described in Lu T., et al., PLOS One. 2017; 12:e0169317). CD163 may be modified (e.g., inactivated or removed) to introduce PRRSV resilience in pigs (such as described in Prather R S et al., Sci Rep. 2017 Oct. 17; 7(1):13371). Similar approaches may be used to inhibit or remove viruses and bacteria (e.g., Swine Influenza Virus (SIV) strains which include influenza C and the subtypes of influenza A known as H1N1, H1N2, H2N1, H3N1, H3N2, and H2N3, as well as pneumonia, meningitis and oedema) that may be transmitted from animals to humans.

[0480] In an embodiment, one or more genes may be modified or edited for disease resistance and production traits. Myostatin (e.g., GDF8) may be modified to increase muscle growth, e.g., in cow, sheep, goat, catfish, and pig (such as described in Crispo M et al., PLOS One. 2015; 10:e0136690; Wang X, et al., Anim Genet. 2018; 49:43-51; Khalil K, et al., Sci Rep. 2017; 7:7301; Kang J-D, et al., RSC Adv. 2017; 7:12541-9). Pc POLLED may be modified to induce horlessness, e.g., in cow (such as described in Carlson D F et al., Nat Biotechnol. 2016; 34:479-81). KISSIR may be modified to induce boretaint (hormone release during sexual maturity leading to undesired meat taste), e.g., in pigs. Dead end protein (dnd) may be modified to induce sterility, e.g., in salmon (such as described in Wargelius A, et al., Sci Rep. 2016; 6:21284). Nano2 and DDX may be modified to induce sterility (e.g., in surrogate hosts), e.g., in pigs and chicken (such as described Park K-E, et al., Sci Rep. 2017; 7:40176; Taylor L et al., Development. 2017; 144:928-34). CD163 may be modified to induce PRRSV resistance, e.g., in pigs (such as described in Whitworth K M, et al., Nat Biotechnol. 2015; 34:20-2). RELA may be modified to induce ASFV resilience, e.g., in pigs (such as described in Lillico S G, et al., Sci Rep. 2016; 6:21645). CD18 may be modified to induce Mannheimia (Pasteurella) haemolytica resilience, e.g., in cows (such as described in Shanthalingam S, et al., roc Natl Acad Sci USA. 2016; 113:13186-90). NRAMP1 may be modified to induce tuberculosis resilience, e.g., in cows (such as described in Gao Y et al., Genome Biol. 2017; 18:13). Endogenous retrovirus genes may be modified or removed for xenotransplantation such as described in Yang L, et al. Science. 2015; 350:1101-4; Niu D et al., Science. 2017; 357:1303-7). Negative regulators of muscle mass (e.g., Myostatin) may be modified (e.g., inactivated) to increase muscle mass, e.g., in dogs (as described in Zou Q et al., J Mol Cell Biol. 2015 December; 7(6):580-3).

[0481] Animals such as pigs with severe combined immunodeficiency (SCID) may generated (e.g., by modifying RAG2) to provide useful models for regenerative medicine, xenotransplantation (discussed also elsewhere herein), and tumor development. Examples of methods and approaches include those described Lee K, et al., Proc Natl Acad Sci USA. 2014 May 20; 111(20):7260-5; and Schomberg et al. FASEB Journal, April 2016; 30(1): Suppl 571.1.

[0482] SNPs in the animals may be modified. Examples of methods and approaches include those described Tan W. et al., Proc Natl Acad Sci USA. 2013 Oct. 8; 110(41):16526-31; Mali P, et al., Science. 2013 Feb. 15; 339(6121):823-6.

[0483] Stem cells (e.g., induced pluripotent stem cells) may be modified and differentiated into desired progeny cells, e.g., as described in Heo Y T et al., Stem Cells Dev. 2015 Feb. 1; 24(3):393-402.

[0484] Profile analysis (such as Igenity) may be performed on animals to screen and identify genetic variations related to economic traits. The genetic variations may be modified to introduce or improve the traits, such as carcass composition, carcass quality, maternal and reproductive traits and average daily gain.

### Models of Genetic and Epigenetic Conditions

[0485] A method of the invention may be used to create a plant, an animal or cell that may be used to model and/or study genetic or epigenetic conditions of interest, such as a through a model of mutations of interest or a disease model. As used herein, “disease” refers to a disease, disorder, or indication in a subject. For example, a method of the invention may be used to create an animal or cell that comprises a modification in one or more nucleic acid sequences associated with a disease, or a plant, animal or cell in which the expression of one or more nucleic acid sequences associated with a disease are altered. Such a nucleic acid sequence may encode a disease associated protein sequence or may be a disease associated control sequence. Accordingly, it is understood that in embodiments of the invention, a plant, subject, patient, organism or cell can be a non-human subject, patient, organism or cell. Thus, the invention provides a plant, animal or cell, produced by the present methods, or a progeny thereof. The progeny may be a clone of the produced plant or animal or may result from sexual reproduction by crossing with other individuals of the same species to introgress further desirable traits into their offspring. The cell may be in vivo or ex vivo in the cases of multicellular organisms, particularly animals or plants. In the instance where the cell is in cultured, a cell line may be established if appropriate culturing conditions are met and preferably if the cell is suitably adapted for this purpose (for instance a stem cell). Bacterial cell lines produced by the invention are also envisaged. Hence, cell lines are also envisaged.

[0486] In some methods, the disease model can be used to study the effects of mutations on the animal or cell and development and/or progression of the disease using measures commonly used in the study of the disease. Alternatively, such a disease model is useful for studying the effect of a pharmaceutically active compound on the disease.

[0487] In some methods, the disease model can be used to assess the efficacy of a potential gene therapy strategy. That is, a disease-associated gene or polynucleotide can be modified such that the disease development and/or progression is inhibited or reduced. In particular, the method comprises modifying a disease-associated gene or polynucleotide such that an altered protein is produced and, as a result, the animal or cell has an altered response. Accordingly, in some methods, a genetically modified animal may be compared with an animal predisposed to development of the disease such that the effect of the gene therapy event may be assessed.

[0488] In another embodiment, this invention provides a method of developing a biologically active agent that modulates a cell signaling event associated with a disease gene. The method comprises contacting a test compound with a cell comprising one or more vectors that drive expression of one or more of components of the system; and detecting a change in a readout that is indicative of a reduction or an augmentation of a cell signaling event associated with, e.g., a mutation in a disease gene contained in the cell.

[0489] A cell model or animal model can be constructed in combination with the method of the invention for screening a cellular function change. Such a model may be used to study the effects of a genome sequence modified by the systems and methods herein on a cellular function of interest. For example, a cellular function model may be used to study the effect of a modified genome sequence on intracellular signaling or extracellular signaling. Alternatively, a cellular function model may be used to study the effects of a modified genome sequence on sensory perception. In some such models, one or more genome sequences associated with a signaling biochemical pathway in the model are modified.

[0490] Several disease models have been specifically investigated. These include de novo autism risk genes CHD8, KATNAL2, and SCN2A; and the syndromic autism (Angelman Syndrome) gene UBE3A. These genes and resulting autism models are of course preferred, but serve to show the broad applicability of the invention across genes and corresponding models. An altered expression of one or more genome sequences associated with a signaling biochemical pathway can be determined by assaying for a difference in the mRNA levels of the corresponding genes between the test model cell and a control cell, when they are contacted with a candidate agent. Alternatively, the differential expression of the sequences associated with a signaling biochemical pathway is determined by detecting a difference in the level of the encoded polypeptide or gene product.

[0491] To assay for an agent-induced alteration in the level of mRNA transcripts or corresponding polynucleotides, nucleic acid contained in a sample is first extracted according to standard methods in the art. For instance, mRNA can be isolated using various lytic enzymes or chemical solutions according to the procedures set forth in Sambrook et al. (1989), or extracted by nucleic-acid-binding resins following the accompanying instructions provided by the manufacturers. The mRNA contained in the extracted nucleic acid sample is then detected by amplification procedures or conventional hybridization assays (e.g., Northern blot analysis) according to methods widely known in the art or based on the methods exemplified herein.

[0492] For purpose of this invention, amplification means any method employing a primer and a polymerase capable of replicating a target sequence with reasonable fidelity. Amplification may be carried out by natural or recombinant DNA polymerases such as TaqGold™, T7 DNA polymerase, Klenow fragment of E. coli DNA polymerase, and reverse transcriptase. A preferred amplification method is PCR. In particular, the isolated RNA can be subjected to a reverse transcription assay that is coupled with a quantitative polymerase chain reaction (RT-PCR) in order to quantify the expression level of a sequence associated with a signaling biochemical pathway.

[0493] Detection of the gene expression level can be conducted in real time in an amplification assay. In one aspect, the amplified products can be directly visualized with fluorescent DNA-binding agents including but not limited to DNA intercalators and DNA groove binders. Because the amount of the intercalators incorporated into the double-stranded DNA molecules is typically proportional to the amount of the amplified DNA products, one can conveniently determine the amount of the amplified products by quantifying the fluorescence of the intercalated dye using conventional optical systems in the art. DNA-binding dye suitable for this application include SYBR green, SYBR blue, DAPI, propidium iodine, Hoeste, SYBR gold, ethidium bromide, acridines, proflavine, acridine orange, acriflavine, fluorcoumanin, ellipticine, daunomycin, chloroquine, distamycin D, chromomycin, homidium, mithramycin, ruthenium polypyridyls, anthramycin, and the like.

[0494] In another aspect, other fluorescent labels such as sequence specific probes can be employed in the amplification reaction to facilitate the detection and quantification of the amplified products. Probe-based quantitative amplification relies on the sequence-specific detection of a desired amplified product. It utilizes fluorescent, target-specific probes (e.g., TaqMan® probes) resulting in increased specificity and sensitivity. Methods for performing probe-based quantitative amplification are well established in the art and are taught in U.S. Pat. No. 5,210,015.

[0495] In yet another aspect, conventional hybridization assays using hybridization probes that share sequence homology with sequences associated with a signaling biochemical pathway can be performed. Typically, probes are allowed to form stable complexes with the sequences associated with a signaling biochemical pathway contained within the biological sample derived from the test subject in a hybridization reaction. It will be appreciated by one of skill in the art that where antisense is used as the probe nucleic acid, the target polynucleotides provided in the sample are chosen to be complementary to sequences of the antisense nucleic acids. Conversely, where the nucleotide probe is a sense nucleic acid, the target polynucleotide is selected to be complementary to sequences of the sense nucleic acid.

[0496] Hybridization can be performed under conditions of various stringency. Suitable hybridization conditions for the practice of the present invention are such that the recognition interaction between the probe and sequences associated with a signaling biochemical pathway is both sufficiently specific and sufficiently stable. Conditions that increase the stringency of a hybridization reaction are widely known and published in the art. See, for example, (Sambrook, et al., (1989); Nonradioactive In Situ Hybridization Application Manual, Boehringer Mannheim, second edition). The hybridization assay can be formed using probes immobilized on any solid support, including but are not limited to nitrocellulose, glass, silicon, and a variety of gene arrays. A preferred hybridization assay is conducted on high-density gene chips as described in U.S. Pat. No. 5,445,934.

[0497] For a convenient detection of the probe-target complexes formed during the hybridization assay, the nucleotide probes are conjugated to a detectable label. Detectable labels suitable for use in the present invention include any composition detectable by photochemical, biochemical, spectroscopic, immunochemical, electrical, optical or chemical means. A wide variety of appropriate detectable labels are known in the art, which include fluorescent or chemiluminescent labels, radioactive isotope labels, enzymatic or other ligands. In preferred embodiments, one will likely desire to employ a fluorescent label or an enzyme tag, such as digoxigenin, β-galactosidase, urease, alkaline phosphatase or peroxidase, avidin/biotin complex.

[0498] The detection methods used to detect or quantify the hybridization intensity will typically depend upon the label selected above. For example, radiolabels may be detected using photographic film or a phosphoimager. Fluorescent markers may be detected and quantified using a photodetector to detect emitted light. Enzymatic labels are typically detected by providing the enzyme with a substrate and measuring the reaction product produced by the action of the enzyme on the substrate; and finally colorimetric labels are detected by simply visualizing the colored label.

[0499] An agent-induced change in expression of sequences associated with a signaling biochemical pathway can also be determined by examining the corresponding gene products. Determining the protein level typically involves a) contacting the protein contained in a biological sample with an agent that specifically bind to a protein associated with a signaling biochemical pathway; and (b) identifying any agent: protein complex so formed. In one aspect of this embodiment, the agent that specifically binds a protein associated with a signaling biochemical pathway is an antibody, preferably a monoclonal antibody.

[0500] The reaction is performed by contacting the agent with a sample of the proteins associated with a signaling biochemical pathway derived from the test samples under conditions that will allow a complex to form between the agent and the proteins associated with a signaling biochemical pathway. The formation of the complex can be detected directly or indirectly according to standard procedures in the art. In the direct detection method, the agents are supplied with a detectable label and unreacted agents may be removed from the complex; the amount of remaining label thereby indicating the amount of complex formed. For such method, it is preferable to select labels that remain attached to the agents even during stringent washing conditions. It is preferable that the label does not interfere with the binding reaction. In the alternative, an indirect detection procedure may use an agent that contains a label introduced either chemically or enzymatically. A desirable label generally does not interfere with binding or the stability of the resulting agent:polypeptide complex. However, the label is typically designed to be accessible to an antibody for an effective binding and hence generating a detectable signal.

[0501] A wide variety of labels suitable for detecting protein levels are known in the art. Non-limiting examples include radioisotopes, enzymes, colloidal metals, fluorescent compounds, bioluminescent compounds, and chemiluminescent compounds.

[0502] The amount of agent:polypeptide complexes formed during the binding reaction can be quantified by standard quantitative assays. As illustrated above, the formation of agent:polypeptide complex can be measured directly by the amount of label remained at the site of binding. In an alternative, the protein associated with a signaling biochemical pathway is tested for its ability to compete with a labeled analog for binding sites on the specific agent. In this competitive assay, the amount of label captured is inversely proportional to the amount of protein sequences associated with a signaling biochemical pathway present in a test sample.

[0503] A number of techniques for protein analysis based on the general principles outlined above are available in the art. They include but are not limited to radioimmunoassays, ELISA (enzyme linked immunoradiometric assays), “sandwich” immunoassays, immunoradiometric assays, in situ immunoassays (using e.g., colloidal gold, enzyme or radioisotope labels), western blot analysis, immunoprecipitation assays, immunofluorescent assays, and SDS-PAGE.

[0504] Antibodies that specifically recognize or bind to proteins associated with a signaling biochemical pathway are preferable for conducting the aforementioned protein analyses. Where desired, antibodies that recognize a specific type of post-translational modifications (e.g., signaling biochemical pathway inducible modifications) can be used. Post-translational modifications include but are not limited to glycosylation, lipidation, acetylation, and phosphorylation. These antibodies may be purchased from commercial vendors. For example, anti-phosphotyrosine antibodies that specifically recognize tyrosine-phosphorylated proteins are available from a number of vendors including Invitrogen and Perkin Elmer. Anti-phosphotyrosine antibodies are particularly useful in detecting proteins that are differentially phosphorylated on their tyrosine residues in response to an ER stress. Such proteins include but are not limited to eukaryotic translation initiation factor 2 alpha (eIF-2α). Alternatively, these antibodies can be generated using conventional polyclonal or monoclonal antibody technologies by immunizing a host animal or an antibody-producing cell with a target protein that exhibits the desired post-translational modification.

[0505] In practicing the subject method, it may be desirable to discern the expression pattern of a protein associated with a signaling biochemical pathway in different bodily tissue, in different cell types, and/or in different subcellular structures. These studies can be performed with the use of tissue-specific, cell-specific or subcellular structure specific antibodies capable of binding to protein markers that are preferentially expressed in certain tissues, cell types, or subcellular structures.

[0506] An altered expression of a gene associated with a signaling biochemical pathway can also be determined by examining a change in activity of the gene product relative to a control cell. The assay for an agent-induced change in the activity of a protein associated with a signaling biochemical pathway will be dependent on the biological activity and/or the signal transduction pathway that is under investigation. For example, where the protein is a kinase, a change in its ability to phosphorylate the downstream substrate(s) can be determined by a variety of assays known in the art. Representative assays include but are not limited to immunoblotting and immunoprecipitation with antibodies such as anti-phosphotyrosine antibodies that recognize phosphorylated proteins. In addition, kinase activity can be detected by high throughput chemiluminescent assays such as AlphaScreen™ (available from Perkin Elmer) and eTag™ assay (Chan-Hui, et al. (2003) Clinical Immunology 111:162-174).

[0507] Where the protein associated with a signaling biochemical pathway is part of a signaling cascade leading to a fluctuation of intracellular pH condition, pH sensitive molecules such as fluorescent pH dyes can be used as the reporter molecules. In another example where the protein associated with a signaling biochemical pathway is an ion channel, fluctuations in membrane potential and/or intracellular ion concentration can be monitored. A number of commercial kits and high-throughput devices are particularly suited for a rapid and robust screening for modulators of ion channels. Representative instruments include FLIPR™ (Molecular Devices, Inc.) and VIPR (Aurora Biosciences). These instruments are capable of detecting reactions in over 1000 sample wells of a microplate simultaneously, and providing real-time measurement and functional data within a second or even a millisecond.

[0508] In practicing any of the methods disclosed herein, a suitable vector can be introduced to a cell or an embryo via one or more methods known in the art, including without limitation, microinjection, electroporation, sonoporation, biolistics, calcium phosphate-mediated transfection, cationic transfection, liposome transfection, dendrimer transfection, heat shock transfection, nucleofection transfection, magnetofection, lipofection, impalefection, optical transfection, proprietary agent-enhanced uptake of nucleic acids, and delivery via liposomes, immunoliposomes, virosomes, or artificial virions. In some methods, the vector is introduced into an embryo by microinjection. The vector or vectors may be microinjected into the nucleus or the cytoplasm of the embryo. In some methods, the vector or vectors may be introduced into a cell by nucleofection.

[0509] The target polynucleotide of a CRISPR complex can be any polynucleotide endogenous or exogenous to the eukaryotic cell. For example, the target polynucleotide can be a polynucleotide residing in the nucleus of the eukaryotic cell. The target polynucleotide can be a sequence coding a gene product (e.g., a protein) or a non-coding sequence (e.g., a regulatory polynucleotide or a junk DNA).

[0510] Examples of target polynucleotides include a sequence associated with a signaling biochemical pathway, e.g., a signaling biochemical pathway-associated gene or polynucleotide. Examples of target polynucleotides include a disease associated gene or polynucleotide. A “disease-associated” gene or polynucleotide refers to any gene or polynucleotide which is yielding transcription or translation products at an abnormal level or in an abnormal form in cells derived from a disease-affected tissues compared with tissues or cells of a non-disease control. It may be a gene that becomes expressed at an abnormally high level; it may be a gene that becomes expressed at an abnormally low level, where the altered expression correlates with the occurrence and/or progression of the disease. A disease-associated gene also refers to a gene possessing mutation(s) or genetic variation that is directly responsible or is in linkage disequilibrium with a gene(s) that is responsible for the etiology of a disease. The transcribed or translated products may be known or unknown and may be at a normal or abnormal level.

[0511] The target polynucleotide of the system herein can be any polynucleotide endogenous or exogenous to the eukaryotic cell. For example, the target polynucleotide can be a polynucleotide residing in the nucleus of the eukaryotic cell. The target polynucleotide can be a sequence coding a gene product (e.g., a protein) or a non-coding sequence (e.g., a regulatory polynucleotide or a junk DNA). Without wishing to be bound by theory, it is believed that the target sequence should be associated with a PAM (protospacer adjacent motif); that is, a short sequence recognized by the CRISPR complex. The precise sequence and length requirements for the PAM differ depending on the CRISPR enzyme used, but PAMs are typically 2-5 base pair sequences adjacent the protospacer (that is, the target sequence) Examples of PAM sequences are given in the examples section below, and the skilled person will be able to identify further PAM sequences for use with a given CRISPR enzyme. Further, engineering of the PAM Interacting (PI) domain may allow programing of PAM specificity, improve target site recognition fidelity, and increase the versatility of the Cas, e.g., Cas9, genome engineering platform. Cas proteins, such as Cas9 proteins may be engineered to alter their PAM specificity, for example as described in Kleinstiver B P et al. Engineered CRISPR-Cas9 nucleases with altered PAM specificities. Nature. 2015 Jul. 23; 523(7561):481-5. doi: 10.1038/nature14592.

[0512] The target polynucleotide of the system may include a number of disease-associated genes and polynucleotides as well as signaling biochemical pathway-associated genes and polynucleotides as listed in U.S. provisional patent applications 61/736,527 and 61/748,427 having Broad reference BI-2011/008/WSGR Docket No. 44063-701.101 and BI-2011/008/WSGR Docket No. 44063-701.102 respectively, both entitled SYSTEMS METHODS AND COMPOSITIONS FOR SEQUENCE MANIPULATION filed on Dec. 12, 2012 and Jan. 2, 2013, respectively, and PCT Application PCT/US2013/074667, entitled DELIVERY, ENGINEERING AND OPTIMIZATION OF SYSTEMS, METHODS AND COMPOSITIONS FOR SEQUENCE MANIPULATION AND THERAPEUTIC APPLICATIONS, filed Dec. 12, 2013, the contents of all of which are herein incorporated by reference in their entirety.

[0513] Examples of target polynucleotides include a sequence associated with a signaling biochemical pathway, e.g., a signaling biochemical pathway-associated gene or polynucleotide. Examples of target polynucleotides include a disease associated gene or polynucleotide. A “disease-associated” gene or polynucleotide refers to any gene or polynucleotide which is yielding transcription or translation products at an abnormal level or in an abnormal form in cells derived from a disease-affected tissues compared with tissues or cells of a non-disease control. It may be a gene that becomes expressed at an abnormally high level; it may be a gene that becomes expressed at an abnormally low level, where the altered expression correlates with the occurrence and/or progression of the disease. A disease-associated gene also refers to a gene possessing mutation(s) or genetic variation that is directly responsible or is in linkage disequilibrium with a gene(s) that is responsible for the etiology of a disease. The transcribed or translated products may be known or unknown and may be at a normal or abnormal level.

### Therapeutic Applications

[0514] Also provided herein are methods of diagnosing, prognosing, treating, and/or preventing a disease, state, or condition in or of a subject. Generally, the methods of diagnosing, prognosing, treating, and/or preventing a disease, state, or condition in or of a subject can include modifying a polynucleotide in a subject or cell thereof using a composition, system, or component thereof described herein and/or include detecting a diseased or healthy polynucleotide in a subject or cell thereof using a composition, system, or component thereof described herein. In an embodiment, the method of treatment or prevention can include using a composition, system, or component thereof to modify a polynucleotide of an infectious organism (e.g., bacterial or virus) within a subject or cell thereof. In an embodiment, the method of treatment or prevention can include using a composition, system, or component thereof to modify a polynucleotide of an infectious organism or symbiotic organism within a subject. The composition, system, and components thereof can be used to develop models of diseases, states, or conditions. The composition, system, and components thereof can be used to detect a disease state or correction thereof, such as by a method of treatment or prevention described herein. The composition, system, and components thereof can be used to screen and select cells that can be used, for example, as treatments or preventions described herein. The composition, system, and components thereof can be used to develop biologically active agents that can be used to modify one or more biologic functions or activities in a subject or a cell thereof.

[0515] In general, the method can include delivering a composition, system, and/or component thereof to a subject or cell thereof, or to an infectious or symbiotic organism by a suitable delivery technique and/or composition. Once administered the components can operate as described elsewhere herein to elicit a nucleic acid modification event. In an embodiment, the nucleic acid modification event can occur at the genomic, epigenomic, and/or transcriptomic level. DNA and/or RNA cleavage, gene activation, and/or gene deactivation can occur. Additional features, uses, and advantages are described in greater detail below. On the basis of this concept, several variations are appropriate to elicit a genomic locus event, including DNA cleavage, gene activation, or gene deactivation. Using the provided compositions, the person skilled in the art can advantageously and specifically target single or multiple loci with the same or different functional domains to elicit one or more genomic locus events. In addition to treating and/or preventing a disease in a subject, the compositions may be applied in a wide variety of methods for screening in libraries in cells and functional modeling in vivo (e.g., gene activation of lincRNA and identification of function; gain-of-function modeling; loss-of-function modeling; the use the compositions of the invention to establish cell lines and transgenic animals for optimization and screening purposes).

[0516] The composition, system, and components thereof described elsewhere herein can be used to treat and/or prevent a disease, such as a genetic and/or epigenetic disease, in a subject. The composition, system, and components thereof described elsewhere herein can be used to treat and/or prevent genetic infectious diseases in a subject, such as bacterial infections, viral infections, fungal infections, parasite infections, and combinations thereof. The composition, system, and components thereof described elsewhere herein can be used to modify the composition or profile of a microbiome in a subject, which can in turn modify the health status of the subject. The composition, system, described herein can be used to modify cells ex vivo, which can then be administered to the subject whereby the modified cells can treat or prevent a disease or symptom thereof. This is also referred to in some contexts as adoptive therapy. The composition, system, described herein can be used to treat mitochondrial diseases, where the mitochondrial disease etiology involves a mutation in the mitochondrial DNA.

[0517] Also provided is a method of treating a subject, e.g., a subject in need thereof, comprising inducing gene editing by transforming the subject with the polynucleotide encoding one or more components of the composition, system, or complex or any of polynucleotides or vectors described herein and administering them to the subject. A suitable repair template may also be provided, for example delivered by a vector comprising said repair template. Also provided is a method of treating a subject, e.g., a subject in need thereof, comprising inducing transcriptional activation or repression of multiple target gene loci by transforming the subject with the polynucleotides or vectors described herein, wherein said polynucleotide or vector encodes or comprises one or more components of composition, system, complex or component thereof comprising multiple Cas effectors. Where any treatment is occurring ex vivo, for example in a cell culture, then it will be appreciated that the term ‘subject’ may be replaced by the phrase “cell or cell culture.”

[0518] Also provided is a method of treating a subject, e.g., a subject in need thereof, comprising inducing gene editing by transforming the subject with the Cas effector(s), advantageously encoding and expressing in vivo the remaining portions of the composition, system, (e.g., RNA, guides). A suitable repair template may also be provided, for example delivered by a vector comprising said repair template. Also provided is a method of treating a subject, e.g., a subject in need thereof, comprising inducing transcriptional activation or repression by transforming the subject with the Cas effector(s) advantageously encoding and expressing in vivo the remaining portions of the composition, system, (e.g., RNA, guides); advantageously in an embodiment the CRISPR enzyme is a catalytically inactive Cas effector and includes one or more associated functional domains. Where any treatment is occurring ex vivo, for example in a cell culture, then it will be appreciated that the term ‘subject’ may be replaced by the phrase “cell or cell culture.”

[0519] One or more components of the composition and system described herein can be included in a composition, such as a pharmaceutical composition, and administered to a host individually or collectively. Alternatively, these components may be provided in a single composition for administration to a host. Administration to a host may be performed via viral vectors known to the skilled person or described herein for delivery to a host (e.g., lentiviral vector, adenoviral vector, AAV vector). As explained herein, use of different selection markers (e.g., for lentiviral gRNA selection) and concentration of gRNA (e.g., dependent on whether multiple gRNAs are used) may be advantageous for eliciting an improved effect.

[0520] Thus, also described herein are methods of inducing one or more polynucleotide modifications in a eukaryotic or prokaryotic cell or component thereof (e.g., a mitochondria) of a subject, infectious organism, and/or organism of the microbiome of the subject. The modification can include the introduction, deletion, or substitution of one or more nucleotides at a target sequence of a polynucleotide of one or more cell(s). The modification can occur in vitro, ex vivo, in situ, or in vivo.

[0521] In an embodiment, the method of treating or inhibiting a condition or a disease caused by one or more mutations in a genomic locus in a eukaryotic organism or a non-human organism can include manipulation of a target sequence within a coding, non-coding or regulatory element of said genomic locus in a target sequence in a subject or a non-human subject in need thereof comprising modifying the subject or a non-human subject by manipulation of the target sequence and wherein the condition or disease is susceptible to treatment or inhibition by manipulation of the target sequence including providing treatment comprising delivering a composition comprising the particle delivery system or the delivery system or the virus particle of any one of the above embodiment or the cell of any one of the above embodiment.

[0522] Also provided herein is the use of the particle delivery system or the delivery system or the virus particle of any one of the above embodiments or the cell of any one of the above embodiments in ex vivo or in vivo gene or genome editing; or for use in in vitro, ex vivo or in vivo gene therapy. Also provided herein are particle delivery systems, non-viral delivery systems, and/or the virus particle of any one of the above embodiments or the cell of any one of the above embodiments used in the manufacture of a medicament for in vitro, ex vivo or in vivo gene or genome editing or for use in in vitro, ex vivo or in vivo gene therapy or for use in a method of modifying an organism or a non-human organism by manipulation of a target sequence in a genomic locus associated with a disease or in a method of treating or inhibiting a condition or disease caused by one or more mutations in a genomic locus in a eukaryotic organism or a non-human organism.

[0523] In an embodiment, polynucleotide modification can include the introduction, deletion, or substitution of 1-75 nucleotides at each target sequence of said polynucleotide of said cell(s). The modification can include the introduction, deletion, or substitution of at least 1, 5, 10, 11, 12, 13, 14, 15, 16, 17, 18, 19, 20, 21, 22, 23, 24, 25, 26, 27, 28, 29, 30, 35, 40, 45, 50, or 75 nucleotides at each target sequence. The modification can include the introduction, deletion, or substitution of at least 5, 10, 11, 12, 13, 14, 15, 16, 17, 18, 19, 20, 21, 22, 23, 24, 25, 26, 27, 28, 29, 30, 35, 40, 45, 50, or 75 nucleotides at each target sequence of said cell(s). The modification can include the introduction, deletion, or substitution of at least 10, 11, 12, 13, 14, 15, 16, 17, 18, 19, 20, 21, 22, 23, 24, 25, 26, 27, 28, 29, 30, 35, 40, 45, 50, or 75 nucleotides at each target sequence of said cell(s). The modification can include the introduction, deletion, or substitution of at least 20, 21, 22, 23, 24, 25, 26, 27, 28, 29, 30, 35, 40, 45, 50, or 75 nucleotides at each target sequence of said cell(s). The modification can include the introduction, deletion, or substitution of at least 40, 45, 50, 75, 100, 200, 300, 400 or 500 nucleotides at each target sequence of said cell(s). The modification can include the introduction, deletion, or substitution of at least 500, 600, 700, 800, 900, 1000, 1100, 1200, 1300, 1400, 1500, 1600, 1700, 1800, 1900, 2000, 2100, 2200, 2300, 2400, 2500, 2600, 2700, 2800, 2900, 3000, 3100, 3200, 3300, 3400, 3500, 3600, 3700, 3800, 3900, 4000, 4100, 4200, 4300, 4400, 4500, 4600, 4700, 4800, 4900, 5000, 5100, 5200, 5300, 5400, 5500, 5600, 5700, 5800, 5900, 6000, 6100, 6200, 6300, 6400, 6500, 6600, 6700, 6800, 6900, 7000, 7100, 7200, 7300, 7400, 7500, 7600, 7700, 7800, 7900, 8000, 8100, 8200, 8300, 8400, 8500, 8600, 8700, 8800, 8900, 9000, 9100, 9200, 9300, 9400, 9500, 9600, 9700, 9800, or 9900 to 10000 nucleotides at each target sequence of said cell(s).

[0524] In an embodiment, the modifications can include the introduction, deletion, or substitution of nucleotides at each target sequence of said cell(s) via nucleic acid components (e.g., guide(s) RNA(s) or sgRNA(s)), such as those mediated by a composition, system, or a component thereof described elsewhere herein. In an embodiment, the modifications can include the introduction, deletion, or substitution of nucleotides at a target or random sequence of said cell(s) via a composition, system, or technique.

[0525] The target sequences of polynucleotides to be modified to treat or prevent disease are described in greater detail below.

[0526] As is also discussed elsewhere herein, the composition, system, can include a template polynucleotide (also referred to herein as template nucleic acids or template sequence). In an embodiment, the template nucleic acid alters the structure of the target position by participating in homologous recombination. In an embodiment, the template nucleic acid alters the sequence of the target position. In an embodiment, the template nucleic acid results in the incorporation of a modified, or non-naturally occurring base into the target nucleic acid.

[0527] The template sequence may undergo a breakage mediated or catalyzed recombination with the target sequence. In an embodiment, the template nucleic acid can include sequence that corresponds to a site on the target sequence that is cleaved, nicked, or otherwise modified by one or more Cas effector mediated cleavage event(s). In an embodiment, the template nucleic acid can include sequence that corresponds to both, a first site on the target sequence that is cleaved, nicked, or otherwise modified in a first Cas effector mediated event, and a second site on the target sequence that is cleaved in a second Cas effector mediated event.

[0528] In an embodiment, the template nucleic acid can include a sequence which results in an alteration in the coding sequence of a translated sequence, e.g., one which results in the substitution of one amino acid for another in a protein product, e.g., transforming a mutant allele into a wild type allele, transforming a wild type allele into a mutant allele, and/or introducing a stop codon, insertion of an amino acid residue, deletion of an amino acid residue, or a nonsense mutation. In an embodiment, the template nucleic acid can include sequence which results in an alteration in a non-coding sequence, e.g., an alteration in an exon or in a 5′ or 3′ non-translated or non-transcribed region. Such alterations include an alteration in a control element, e.g., a promoter, enhancer, and an alteration in a cis-acting or trans-acting control element.

[0529] A template nucleic acid having homology with a target position in a target gene may be used to alter the structure of a target sequence. The template sequence may be used to alter an unwanted structure, e.g., an unwanted or mutant nucleotide. The template nucleic acid may include sequence which, when integrated, results in: decreasing the activity of a positive control element; increasing the activity of a positive control element; decreasing the activity of a negative control element; increasing the activity of a negative control element; decreasing the expression of a gene; increasing the expression of a gene; increasing resistance to a disorder or disease; increasing resistance to viral entry; correcting a mutation or altering an unwanted amino acid residue conferring, increasing, abolishing or decreasing a biological property of a gene product, e.g., increasing the enzymatic activity of an enzyme, or increasing the ability of a gene product to interact with another molecule.

[0530] The template nucleic acid may include sequence which results in: a change in sequence of 1, 2, 3, 4, 5, 6, 7, 8, 9, 10, 11, 12 or more nucleotides of the target sequence. In an embodiment, the template nucleic acid may be 20+/−10, 30+/−10, 40+/−10, 50+/−10, 60+/−10, 70+/−10, 80+/−10, 90+/−10, 100+/−10, 110+/−10, 120+/−10, 130+/−10, 140+/−10, 150+/−10, 160+/−10, 170+/−10, 180+/−10, 190+/−10, 200+/−10, 210+/−10, or 220+/−10 nucleotides in length. In an embodiment, the template nucleic acid may be 30+/−20, 40+/−20, 50+/−20, 60+/−20, 70+/−20, 80+/−20, 90+/−20, 100+/−20, 110+/−20, 120+/−20, 130+/−20, 140+/−20, 150+/−20, 160+/−20, 170+/−20, 180+/−20, 190+/−20, 200+/−20, 210+/−20, or 220+/−20 nucleotides in length. In an embodiment, the template nucleic acid is 10 to 1,000, 20 to 900, 30 to 800, 40 to 700, 50 to 600, 50 to 500, 50 to 400, 50 to 300, 50 to 200, or 50 to 100 nucleotides in length.

[0531] A template nucleic acid comprises the following components: [5′ homology arm]-[replacement sequence]-[3′ homology arm]. The homology arms provide for recombination into the chromosome, thus replacing the undesired element, e.g., a mutation or signature, with the replacement sequence. In an embodiment, the homology arms flank the most distal cleavage sites. In an embodiment, the 3′ end of the 5′ homology arm is the position next to the 5′ end of the replacement sequence. In an embodiment, the 5′ homology arm can extend at least 10, 20, 30, 40, 50, 100, 200, 300, 400, 500, 600, 700, 800, 900, 1000, 1500, or 2000 nucleotides 5′ from the 5′ end of the replacement sequence. In an embodiment, the 5′ end of the 3′ homology arm is the position next to the 3′ end of the replacement sequence. In an embodiment, the 3′ homology arm can extend at least 10, 20, 30, 40, 50, 100, 200, 300, 400, 500, 600, 700, 800, 900, 1000, 1500, or 2000 nucleotides 3′ from the 3′ end of the replacement sequence.

[0532] In an embodiment, one or both homology arms may be shortened to avoid including certain sequence repeat elements. For example, a 5′ homology arm may be shortened to avoid a sequence repeat element. In other embodiments, a 3′ homology arm may be shortened to avoid a sequence repeat element. In an embodiment, both the 5′ and the 3′ homology arms may be shortened to avoid including certain sequence repeat elements.

[0533] In an embodiment, a template nucleic acid for correcting a mutation may designed for use as a single-stranded oligonucleotide. When using a single-stranded oligonucleotide, 5′ and 3′ homology arms may range up to about 200 base pairs (bp) in length, e.g., at least 25, 50, 75, 100, 125, 150, 175, or 200 bp in length.

[0534] In an embodiment, the composition, system, or component thereof can promote Non-Homologous End-Joining (NHEJ). In an embodiment, modification of a polynucleotide by a composition, system, or a component thereof, such as a diseased polynucleotide, can include NHEJ. In an embodiment, promotion of this repair pathway by the composition, system, or a component thereof can be used to target gene or polynucleotide specific knock-outs and/or knock-ins. In an embodiment, promotion of this repair pathway by the composition, system, or a component thereof can be used to generate NHEJ-mediated indels. Nuclease-induced NHEJ can also be used to remove (e.g., delete) sequence in a gene of interest. Generally, NHEJ repairs a double-strand break in the DNA by joining together the two ends; however, generally, the original sequence is restored only if two compatible ends, exactly as they were formed by the double-strand break, are perfectly ligated. The DNA ends of the double-strand break are frequently the subject of enzymatic processing, resulting in the addition or removal of nucleotides, at one or both strands, prior to rejoining of the ends. This results in the presence of insertion and/or deletion (indel) mutations in the DNA sequence at the site of the NHEJ repair. The indel can range in size from 1-50 or more base pairs. In an embodiment thee indel can be 1, 2, 3, 4, 5, 6, 7, 8, 9, 10, 11, 12, 13, 14, 15, 16, 17, 18, 19, 20, 21, 22, 23, 24, 25, 26, 27, 28, 29, 30, 31, 32, 33, 34, 35, 36, 37, 38, 39, 40, 41, 42, 43, 44, 45, 46, 47, 48, 49, 50, 51, 52, 53, 54, 55, 56, 57, 58, 59, 60, 61, 62, 63, 64, 65, 66, 67, 68, 69, 70, 71, 72, 73, 74, 75, 76, 77, 78, 79, 80, 81, 82, 83, 84, 85, 86, 87, 88, 89, 90, 91, 92, 93, 94, 95, 96, 97, 98, 99, 100, 101, 102, 103, 104, 105, 106, 107, 108, 109, 110, 111, 112, 113, 114, 115, 116, 117, 118, 119, 120, 121, 122, 123, 124, 125, 126, 127, 128, 129, 130, 131, 132, 133, 134, 135, 136, 137, 138, 139, 140, 141, 142, 143, 144, 145, 146, 147, 148, 149, 150, 151, 152, 153, 154, 155, 156, 157, 158, 159, 160, 161, 162, 163, 164, 165, 166, 167, 168, 169, 170, 171, 172, 173, 174, 175, 176, 177, 178, 179, 180, 181, 182, 183, 184, 185, 186, 187, 188, 189, 190, 191, 192, 193, 194, 195, 196, 197, 198, 199, 200, 201, 202, 203, 204, 205, 206, 207, 208, 209, 210, 211, 212, 213, 214, 215, 216, 217, 218, 219, 220, 221, 222, 223, 224, 225, 226, 227, 228, 229, 230, 231, 232, 233, 234, 235, 236, 237, 238, 239, 240, 241, 242, 243, 244, 245, 246, 247, 248, 249, 250, 251, 252, 253, 254, 255, 256, 257, 258, 259, 260, 261, 262, 263, 264, 265, 266, 267, 268, 269, 270, 271, 272, 273, 274, 275, 276, 277, 278, 279, 280, 281, 282, 283, 284, 285, 286, 287, 288, 289, 290, 291, 292, 293, 294, 295, 296, 297, 298, 299, 300, 301, 302, 303, 304, 305, 306, 307, 308, 309, 310, 311, 312, 313, 314, 315, 316, 317, 318, 319, 320, 321, 322, 323, 324, 325, 326, 327, 328, 329, 330, 331, 332, 333, 334, 335, 336, 337, 338, 339, 340, 341, 342, 343, 344, 345, 346, 347, 348, 349, 350, 351, 352, 353, 354, 355, 356, 357, 358, 359, 360, 361, 362, 363, 364, 365, 366, 367, 368, 369, 370, 371, 372, 373, 374, 375, 376, 377, 378, 379, 380, 381, 382, 383, 384, 385, 386, 387, 388, 389, 390, 391, 392, 393, 394, 395, 396, 397, 398, 399, 400, 401, 402, 403, 404, 405, 406, 407, 408, 409, 410, 411, 412, 413, 414, 415, 416, 417, 418, 419, 420, 421, 422, 423, 424, 425, 426, 427, 428, 429, 430, 431, 432, 433, 434, 435, 436, 437, 438, 439, 440, 441, 442, 443, 444, 445, 446, 447, 448, 449, 450, 451, 452, 453, 454, 455, 456, 457, 458, 459, 460, 461, 462, 463, 464, 465, 466, 467, 468, 469, 470, 471, 472, 473, 474, 475, 476, 477, 478, 479, 480, 481, 482, 483, 484, 485, 486, 487, 488, 489, 490, 491, 492, 493, 494, 495, 496, 497, 498, 499, or 500 base pairs or more. If a double-strand break is targeted near to a short target sequence, the deletion mutations caused by the NHEJ repair often span, and therefore remove, the unwanted nucleotides. For the deletion of larger DNA segments, introducing two double-strand breaks, one on each side of the sequence, can result in NHEJ between the ends with removal of the entire intervening sequence. Both of these approaches can be used to delete specific DNA sequences.

[0535] In an embodiment, composition, system, mediated NHEJ can be used in the method to delete small sequence motifs. In an embodiment, composition, system, mediated NHEJ can be used in the method to generate NHEJ-mediate indels that can be targeted to the gene, e.g., a coding region, e.g., an early coding region of a gene of interest can be used to knockout (i.e., eliminate expression of) a gene of interest. For example, early coding region of a gene of interest includes sequence immediately following a transcription start site, within a first exon of the coding sequence, or within 500 bp of the transcription start site (e.g., less than 500, 450, 400, 350, 300, 250, 200, 150, 100 or 50 bp). In an embodiment, in which a guide RNA and Cas effector generate a double strand break for the purpose of inducing NHEJ-mediated indels, a guide RNA may be configured to position one double-strand break in close proximity to a nucleotide of the target position. In an embodiment, the cleavage site may be between 0-500 bp away from the target position (e.g., less than 500, 400, 300, 200, 100, 50, 40, 30, 25, 20, 15, 10, 9, 8, 7, 6, 5, 4, 3, 2 or 1 bp from the target position). In an embodiment, in which two guide RNAs complexing with one or more Cas nickases induce two single strand breaks for the purpose of inducing NHEJ-mediated indels, two guide RNAs may be configured to position two single-strand breaks to provide for NHEJ repair a nucleotide of the target position.

[0536] For minimization of toxicity and off-target effect, it may be important to control the concentration of Cas mRNA and guide RNA delivered. Optimal concentrations of Cas mRNA and guide RNA can be determined by testing different concentrations in a cellular or non-human eukaryote animal model and using deep sequencing the analyze the extent of modification at potential off-target genomic loci. Alternatively, to minimize the level of toxicity and off-target effect, Cas nickase mRNA (for example S. pyogenes Cas9 with the D10A mutation) can be delivered with a pair of guide RNAs targeting a site of interest. Guide sequences and strategies to minimize toxicity and off-target effects can be as in WO 2014/093622 (PCT/US2013/074667); or, via mutation. Others are as described elsewhere herein.

[0537] Typically, in the context of an endogenous CRISPR or CAST system, formation of a CRISPR or CAST complex (comprising a guide sequence hybridized to a target sequence and complexed with one or more Cas proteins) results in cleavage, nicking, and/or another modification of one or both strands in or near (e.g. within 1, 2, 3, 4, 5, 6, 7, 8, 9, 10, 20, 50, or more base pairs from) the target sequence. In an embodiment, the tracr sequence, which may comprise or consist of all or a portion of a wild-type tracr sequence (e.g., about or more than about 20, 26, 32, 45, 48, 54, 63, 67, 85, or more nucleotides of a wild-type tracr sequence), can also form part of a CRISPR complex, such as by hybridization along at least a portion of the tracr sequence to all or a portion of a tracr mate sequence that is operably linked to the guide sequence.

[0538] In an embodiment, a method of modifying a target polynucleotide in a cell to treat or prevent a disease can include allowing a composition, system, or component thereof to bind to the target polynucleotide, e.g., to effect cleavage, nicking, or other modification as the composition, system, is capable of said target polynucleotide, thereby modifying the target polynucleotide, wherein the composition, system, or component thereof, complex with a guide sequence, and hybridize said guide sequence to a target sequence within the target polynucleotide, wherein said guide sequence is optionally linked to a tracr mate sequence, which in turn can hybridize to a tracr sequence. In some of these embodiments, the composition, system, or component thereof can be or include a CRISPR-Cas effector complexed with a guide sequence. In an embodiment, modification can include cleaving or nicking one or two strands at the location of the target sequence by one or more components of the composition, system, or component thereof.

[0539] The cleavage, nicking, or other modification capable of being performed by the composition, system, can modify transcription of a target polynucleotide. In an embodiment, modification of transcription can include decreasing transcription of a target polynucleotide. In an embodiment, modification can include increasing transcription of a target polynucleotide. In an embodiment, the method includes repairing said cleaved target polynucleotide by homologous recombination with an exogenous template polynucleotide, wherein said repair results in a modification such as, but not limited to, an insertion, deletion, or substitution of one or more nucleotides of said target polynucleotide. In an embodiment, said modification results in one or more amino acid changes in a protein expressed from a gene comprising the target sequence. In an embodiment, the modification imparted by the composition, system, or component thereof provides a transcript and/or protein that can correct a disease or a symptom thereof, including but not limited to, any of those described in greater detail elsewhere herein.

[0540] In an embodiment, the method of treating or preventing a disease can include delivering one or more vectors or vector systems to a cell, such as a eukaryotic or prokaryotic cell, wherein one or more vectors or vector systems include the composition, system, or component thereof. In an embodiment, the vector(s) or vector system(s) can be a viral vector or vector system, such as an AAV or lentiviral vector system, which are described in greater detail elsewhere herein. In an embodiment, the method of treating or preventing a disease can include delivering one or more viral particles, such as an AAV or lentiviral particle, containing the composition, system, or component thereof. In an embodiment, the viral particle has a tissue specific tropism. In an embodiment, the viral particle has a liver, muscle, eye, heart, pancreas, kidney, neuron, epithelial cell, endothelial cell, astrocyte, glial cell, immune cell, or red blood cell specific tropism.

[0541] It will be understood that the composition, system, according to the invention as described herein, such as the composition, system, for use in the methods according to the invention as described herein, may be suitably used for any type of application known for composition, system, preferably in eukaryotes. In certain aspects, the application is therapeutic, preferably therapeutic in a eukaryote organism, such as including but not limited to animals (including human), plants, algae, fungi (including yeasts), etc. Alternatively, or in addition, in certain aspects, the application may involve accomplishing or inducing one or more particular traits or characteristics, such as genotypic and/or phenotypic traits or characteristics, as also described elsewhere herein.

### Treating Diseases of the Circulatory System

[0542] In an embodiment, the composition, system, and/or component thereof described herein can be used to treat and/or prevent a circulatory system disease. Exemplary disease is provided, for example, in Tables 3 and 4. In an embodiment the plasma exosomes of Wahlgren et al. (Nucleic Acids Research, 2012, Vol. 40, No. 17 e130) can be used to deliver the composition, system, and/or component thereof described herein to the blood. In an embodiment, the circulatory system disease can be treated by using a lentivirus to deliver the composition, system, described herein to modify hematopoietic stem cells (HSCs) in vivo or ex vivo (see e.g. Drakopoulou, “Review Article, The Ongoing Challenge of Hematopoietic Stem Cell-Based Gene Therapy for β-Thalassemia,” Stem Cells International, Volume 2011, Article ID 987980, 10 pages, doi: 10.4061/2011/987980, which can be adapted for use with the composition, system, herein in view of the description herein). In an embodiment, the circulatory system disorder can be treated by correcting HSCs as to the disease using a composition, system, herein or a component thereof, wherein the composition, system, optionally includes a suitable HDR repair template (see e.g. Cavazzana, “Outcomes of Gene Therapy for β-Thalassemia Major via Transplantation of Autologous Hematopoietic Stem Cells Transduced Ex Vivo with a Lentiviral BA-T87Q-Globin Vector.”; Cavazzana-Calvo, “Transfusion independence and HMGA2 activation after gene therapy of human β-thalassaemia”, Nature 467, 318-322 (16 Sep. 2010) doi: 10.1038/nature09328; Nienhuis, “Development of Gene Therapy for Thalassemia, Cold Spring Harbor Perspectives in Medicine, doi: 10.1101/cshperspect.a011833 (2012), LentiGlobin BB305, a lentiviral vector containing an engineered β-globin gene (βA-T87Q); and Xie et al., “Seamless gene correction of β-thalassaemia mutations in patient-specific iPSCs using CRISPR/Cas9 and piggyback” Genome Research gr. 173427.114 (2014) www.genome.org/cgi/doi/10.1101/gr.173427.114 (Cold Spring Harbor Laboratory Press; Watts, “Hematopoietic Stem Cell Expansion and Gene Therapy” Cytotherapy 13(10):1164-1171. doi: 10.3109/14653249.2011.620748 (2011), which can be adapted for use with the composition, system, herein in view of the description herein). In an embodiment, iPSCs can be modified using a composition, system, described herein to correct a disease polynucleotide associated with a circulatory disease. In this regard, the teachings of Xu et al. (Sci Rep. 2015 Jul. 9; 5:12065. doi: 10.1038/srep12065) and Song et al. (Stem Cells Dev. 2015 May 1; 24(9):1053-65. doi: 10.1089/scd.2014.0347. Epub 2015 Feb. 5) with respect to modifying iPSCs can be adapted for use in view of the description herein with the composition, system, described herein.

[0543] The term “Hematopoietic Stem Cell” or “HSC” refers broadly those cells considered to be an HSC, e.g., blood cells that give rise to all the other blood cells and are derived from mesoderm; located in the red bone marrow, which is contained in the core of most bones. HSCs of the invention include cells having a phenotype of hematopoietic stem cells, identified by small size, lack of lineage (lin) markers, and markers that belong to the cluster of differentiation series, like: CD34, CD38, CD90, CD133, CD105, CD45, and also c-kit, —the receptor for stem cell factor. Hematopoietic stem cells are negative for the markers that are used for detection of lineage commitment, and are, thus, called Lin−; and, during their purification by FACS, a number of up to 14 different mature blood-lineage markers, e.g., CD13 & CD33 for myeloid, CD71 for erythroid, CD19 for B cells, CD61 for megakaryocytic, etc. for humans; and, B220 (murine CD45) for B cells, Mac-1 (CD11b/CD18) for monocytes, Gr-1 for Granulocytes, Ter119 for erythroid cells, Il7Ra, CD3, CD4, CD5, CD8 for T cells, etc. Mouse HSC markers: CD34lo/−, SCA-1+, Thy1.1+/lo, CD38+, C-kit+, lin−, and Human HSC markers: CD34+, CD59+, Thyl/CD90+, CD38lo/−, C-kit/CD117+, and lin−. HSCs are identified by markers. Hence in embodiments discussed herein, the HSCs can be CD34+ cells. HSCs can also be hematopoietic stem cells that are CD34−/CD38−. Stem cells that may lack c-kit on the cell surface that are considered in the art as HSCs are within the ambit of the invention, as well as CD133+ cells likewise considered HSCs in the art.

[0544] The CRISPR-Cas (system may be engineered to target genetic locus or loci in HSCs. In an embodiment, the Cas effector(s) can be codon-optimized for a eukaryotic cell and especially a mammalian cell, e.g., a human cell, for instance, HSC, or iPSC and sgRNA targeting a locus or loci in HSC, such as circulatory disease, can be prepared. These may be delivered via particles. The particles may be formed by the Cas effector (e.g., Cas9) protein and the gRNA being admixed. The gRNA and Cas effector (e.g., Cas9) protein mixture can be, for example, admixed with a mixture comprising or consisting essentially of or consisting of surfactant, phospholipid, biodegradable polymer, lipoprotein and alcohol, whereby particles containing the gRNA and Cas effector (e.g., Cas9) protein may be formed. The invention comprehends so making particles and particles from such a method as well as uses thereof. Particles suitable delivery of the CRISRP-Cas systems in the context of blood or circulatory system or HSC delivery to the blood or circulatory system are described in greater detail elsewhere herein.

[0545] In an embodiment, after ex vivo modification the HSCs or iPCS can be expanded prior to administration to the subject. Expansion of HSCs can be via any suitable method such as that described by, Lee, “Improved ex vivo expansion of adult hematopoietic stem cells by overcoming CUL4-mediated degradation of HOXB4.” Blood. 2013 May 16; 121(20):4082-9. doi: 10.1182/blood-2012-09-455204. Epub 2013 Mar. 21.

[0546] In an embodiment, the HSCs or iPSCs modified can be autologous. In an embodiment, the HSCs or iPSCs can be allogenic. In addition to the modification of the disease gene(s), allogenic cells can be further modified using the composition, system, described herein to reduce the immunogenicity of the cells when delivered to the recipient. Such techniques are described elsewhere herein and e.g., Cartier, “MINI-SYMPOSIUM: X-Linked Adrenoleukodystrophypa, Hematopoietic Stem Cell Transplantation and Hematopoietic Stem Cell Gene Therapy in X-Linked Adrenoleukodystrophy,” Brain Pathology 20 (2010) 857-862, which can be adapted for use with the composition, system, herein.

### Treating Diseases of the Brain

[0547] In an embodiment, the compositions, systems, described herein can be used to treat diseases of the brain and CNS. Delivery options for the brain include encapsulation of CRISPR enzyme and guide RNA in the form of either DNA or RNA into liposomes and conjugating to molecular Trojan horses for trans-blood brain barrier (BBB) delivery. Molecular Trojan horses have been shown to be effective for delivery of B-gal expression vectors into the brain of non-human primates. The same approach can be used to delivery vectors containing CRISPR enzyme and guide RNA. For instance, Xia C F and Boado R J, Pardridge W M (“Antibody-mediated targeting of siRNA via the human insulin receptor using avidin-biotin technology.” Mol Pharm. 2009 May-June; 6(3):747-51. doi: 10.1021/mp800194) describes how delivery of short interfering RNA (siRNA) to cells in culture, and in vivo, is possible with combined use of a receptor-specific monoclonal antibody (mAb) and avidin-biotin technology. The authors also report that because the bond between the targeting mAb and the siRNA is stable with avidin-biotin technology, and RNAi effects at distant sites such as brain are observed in vivo following an intravenous administration of the targeted siRNA, the teachings of which can be adapted for use with the compositions, systems, herein. In other embodiments, an artificial virus can be generated for CNS and/or brain delivery. See e.g., Zhang et al. (Mol Ther. 2003 January; 7(1):11-8.)), the teachings of which can be adapted for use with the compositions, systems, herein.

### Treating Hearing Diseases

[0548] In an embodiment the composition, system, described herein can be used to treat a hearing disease or hearing loss in one or both ears. Deafness is often caused by lost or damaged hair cells that cannot relay signals to auditory neurons. In such cases, cochlear implants may be used to respond to sound and transmit electrical signals to the nerve cells. But these neurons often degenerate and retract from the cochlea as fewer growth factors are released by impaired hair cells.

[0549] In an embodiment, the composition, system, or modified cells can be delivered to one or both ears for treating or preventing hearing disease or loss by any suitable method or technique. Suitable methods and techniques include, but are not limited to, those set forth in U.S. patent application No. 20120328580 describes injection of a pharmaceutical composition into the ear (e.g., auricular administration), such as into the luminae of the cochlea (e.g., the Scala media, Sc vestibulae, and Sc tympani), e.g., using a syringe, e.g., a single-dose syringe. For example, one or more of the compounds described herein can be administered by intratympanic injection (e.g., into the middle ear), and/or injections into the outer, middle, and/or inner ear; administration in situ, via a catheter or pump (see e.g. McKenna et al., (U.S. Publication No. 2006/0030837) and Jacobsen et al., (U.S. Pat. No. 7,206,639); administration in combination with a mechanical device such as a cochlear implant or a hearing aid, which is worn in the outer ear (see e.g., U.S. Publication No. 2007/0093878, which provides an exemplary cochlear implant suitable for delivery of the compositions, systems, described herein to the ear). Such methods are routinely used in the art, for example, for the administration of steroids and antibiotics into human ears. Injection can be, for example, through the round window of the ear or through the cochlear capsule. Other inner ear administration methods are known in the art (see, e.g., Salt and Plontke, Drug Discovery Today, 10:1299-1306, 2005). In an embodiment, a catheter or pump can be positioned, e.g., in the ear (e.g., the outer, middle, and/or inner ear) of a patient during a surgical procedure. In an embodiment, a catheter or pump can be positioned, e.g., in the ear (e.g., the outer, middle, and/or inner ear) of a patient without the need for a surgical procedure.

[0550] In general, the cell therapy methods described in U.S. patent application No. 20120328580 can be used to promote complete or partial differentiation of a cell to or towards a mature cell type of the inner ear (e.g., a hair cell) in vitro. Cells resulting from such methods can then be transplanted or implanted into a patient in need of such treatment. The cell culture methods required to practice these methods, including methods for identifying and selecting suitable cell types, methods for promoting complete or partial differentiation of selected cells, methods for identifying complete or partially differentiated cell types, and methods for implanting complete or partially differentiated cells are described below.

[0551] Cells suitable for use in the present invention include, but are not limited to, cells that are capable of differentiating completely or partially into a mature cell of the inner ear, e.g., a hair cell (e.g., an inner and/or outer hair cell), when contacted, e.g., in vitro, with one or more of the compounds described herein. Exemplary cells that are capable of differentiating into a hair cell include, but are not limited to stem cells (e.g., inner ear stem cells, adult stem cells, bone marrow derived stem cells, embryonic stem cells, mesenchymal stem cells, skin stem cells, iPS cells, and fat derived stem cells), progenitor cells (e.g., inner ear progenitor cells), support cells (e.g., Deiters' cells, pillar cells, inner phalangeal cells, tectal cells and Hensen's cells), and/or germ cells. The use of stem cells for the replacement of inner ear sensory cells is described in Li et al., (U.S. Publication No. 2005/0287127) and Li et al., (U.S. patent Ser. No. 11/953,797). The use of bone marrow derived stem cells for the replacement of inner ear sensory cells is described in Edge et al., PCT/US2007/084654. iPS cells are described, e.g., at Takahashi et al., Cell, Volume 131, Issue 5, Pages 861-872 (2007); Takahashi and Yamanaka, Cell 126, 663-76 (2006); Okita et al., Nature 448, 260-262 (2007); Yu, J. et al., Science 318(5858):1917-1920 (2007); Nakagawa et al., Nat. Biotechnol. 26:101-106 (2008); and Zaehres and Scholer, Cell 131(5):834-835 (2007). Such suitable cells can be identified by analyzing (e.g., qualitatively or quantitatively) the presence of one or more tissue specific genes. For example, gene expression can be detected by detecting the protein product of one or more tissue-specific genes. Protein detection techniques involve staining proteins (e.g., using cell extracts or whole cells) using antibodies against the appropriate antigen. In this case, the appropriate antigen is the protein product of the tissue-specific gene expression. Although, in principle, a first antibody (i.e., the antibody that binds the antigen) can be labeled, it is more common (and improves the visualization) to use a second antibody directed against the first (e.g., an anti-IgG). This second antibody is conjugated either with fluorochromes, or appropriate enzymes for colorimetric reactions, or gold beads (for electron microscopy), or with the biotin-avidin system, so that the location of the primary antibody, and thus the antigen, can be recognized.

[0552] The composition and system may be delivered to the ear by direct application of pharmaceutical composition to the outer ear, with compositions modified from US Published application, 20110142917. In an embodiment the pharmaceutical composition is applied to the ear canal. Delivery to the ear may also be referred to as aural or otic delivery.

[0553] In an embodiment, the compositions, systems, or components thereof and/or vectors or vector systems can be delivered to ear via a transfection to the inner ear through the intact round window by a novel proteidic delivery technology which may be applied to the nucleic acid-targeting system of the present invention (see, e.g., Qi et al., Gene Therapy (2013), 1-9). About 40 μl of 10 mM RNA may be contemplated as the dosage for administration to the ear.

[0554] According to Rejali et al. (Hear Res. 2007 June; 228(1-2):180-7), cochlear implant function can be improved by good preservation of the spiral ganglion neurons, which are the target of electrical stimulation by the implant and brain derived neurotrophic factor (BDNF) has previously been shown to enhance spiral ganglion survival in experimentally deafened ears. Rejali et al. tested a modified design of the cochlear implant electrode that includes a coating of fibroblast cells transduced by a viral vector with a BDNF gene insert. To accomplish this type of ex vivo gene transfer, Rejali et al. transduced guinea pig fibroblasts with an adenovirus with a BDNF gene cassette insert, and determined that these cells secreted BDNF and then attached BDNF-secreting cells to the cochlear implant electrode via an agarose gel, and implanted the electrode in the scala tympani. Rejali et al. determined that the BDNF expressing electrodes were able to preserve significantly more spiral ganglion neurons in the basal turns of the cochlea after 48 days of implantation when compared to control electrodes and demonstrated the feasibility of combining cochlear implant therapy with ex vivo gene transfer for enhancing spiral ganglion neuron survival. Such a system may be applied to the nucleic acid-targeting system of the present invention for delivery to the ear.

[0555] In an embodiment, the system set forth in Mukherjea et al. (Antioxidants & Redox Signaling, Volume 13, Number 5, 2010) can be adapted for transtympanic administration of the composition, system, or component thereof to the ear. In an embodiment, a dosage of about 2 mg to about 4 mg of CRISPR Cas for administration to a human.

[0556] In an embodiment, the system set forth in [Jung et al. (Molecular Therapy, vol. 21 no. 4, 834-841 April 2013) can be adapted for vestibular epithelial delivery of the composition, system, or component thereof to the ear. In an embodiment, a dosage of about 1 to about 30 mg of CRISPR Cas for administration to a human.

### Treating Diseases in Non-Dividing Cells

[0557] In an embodiment, the gene or transcript to be corrected is in a non-dividing cell. Exemplary non-dividing cells are muscle cells or neurons. Non-dividing (especially non-dividing, fully differentiated) cell types present issues for gene targeting or genome engineering, for example because homologous recombination (HR) is generally suppressed in the G1 cell-cycle phase. However, while studying the mechanisms by which cells control normal DNA repair systems, Durocher discovered a previously unknown switch that keeps HR “off” in non-dividing cells and devised a strategy to toggle this switch back on. Orthwein et al. (Daniel Durocher's lab at the Mount Sinai Hospital in Ottawa, Canada) recently reported (Nature 16142, published online 9 Dec. 2015) have shown that the suppression of HR can be lifted and gene targeting successfully concluded in both kidney (293T) and osteosarcoma (U2OS) cells. Tumor suppressors, BRCA1, PALB2 and BRAC2 are known to promote DNA DSB repair by HR. They found that formation of a complex of BRCA1 with PALB2-BRAC2 is governed by a ubiquitin site on PALB2, such that action on the site by an E3 ubiquitin ligase. This E3 ubiquitin ligase is composed of KEAP1 (a PALB2-interacting protein) in complex with cullin-3 (CUL3)-RBX1. PALB2 ubiquitylation suppresses its interaction with BRCA1 and is counteracted by the deubiquitylase USP11, which is itself under cell cycle control. Restoration of the BRCA1-PALB2 interaction combined with the activation of DNA-end resection is sufficient to induce homologous recombination in G1, as measured by a number of methods including a CRISPR-Cas9-based gene-targeting assay directed at USP11 or KEAP1 (expressed from a pX459 vector). However, when the BRCA1-PALB2 interaction was restored in resection-competent G1 cells using either KEAP1 depletion or expression of the PALB2-KR mutant, a robust increase in gene-targeting events was detected. These teachings can be adapted for and/or applied to the Cas compositions, systems, described herein.

[0558] Thus, reactivation of HR in cells, especially non-dividing, fully differentiated cell types is preferred, in an embodiment. In an embodiment, promotion of the BRCA1-PALB2 interaction is preferred in an embodiment. In an embodiment, the target ell is a non-dividing cell. In an embodiment, the target cell is a neuron or muscle cell. In an embodiment, the target cell is targeted in vivo. In an embodiment, the cell is in G1 and HR is suppressed. In an embodiment, use of KEAP1 depletion, for example inhibition of expression of KEAP1 activity, is preferred. KEAP1 depletion may be achieved through siRNA, for example as shown in Orthwein et al. Alternatively, expression of the PALB2-KR mutant (lacking all eight Lys residues in the BRCA1-interaction domain is preferred, either in combination with KEAP1 depletion or alone. PALB2-KR interacts with BRCA1 irrespective of cell cycle position. Thus, promotion or restoration of the BRCA1-PALB2 interaction, especially in G1 cells, is preferred in an embodiment, especially where the target cells are non-dividing, or where removal and return (ex vivo gene targeting) is problematic, for example neuron or muscle cells. KEAP1 siRNA is available from ThermoFischer. In an embodiment, a BRCA1-PALB2 complex may be delivered to the G1 cell. In an embodiment, PALB2 deubiquitylation may be promoted for example by increased expression of the deubiquitylase USP11, so it is envisaged that a construct may be provided to promote or up-regulate expression or activity of the deubiquitylase USP11.

### Treating Diseases of the Eye

[0559] In an embodiment, the disease to be treated is a disease that affects the eyes. Thus, in an embodiment, the composition, system, or component thereof described herein is delivered to one or both eyes.

[0560] The composition, system, can be used to correct ocular defects that arise from several genetic mutations further described in Genetic Diseases of the Eye, Second Edition, edited by Elias I. Traboulsi, Oxford University Press, 2012.

[0561] In an embodiment, the condition to be treated or targeted is an eye disorder. In an embodiment, the eye disorder may include glaucoma. In an embodiment, the eye disorder includes a retinal degenerative disease. In an embodiment, the retinal degenerative disease is selected from Stargardt disease, Bardet-Biedl Syndrome, Best disease, Blue Cone Monochromacy, Choroidermia, Cone-rod dystrophy, Congenital Stationary Night Blindness, Enhanced S-Cone Syndrome, Juvenile X-Linked Retinoschisis, Leber Congenital Amaurosis, Malattia Leventinesse, Norrie Disease or X-linked Familial Exudative Vitreoretinopathy, Pattern Dystrophy, Sorsby Dystrophy, Usher Syndrome, Retinitis Pigmentosa, Achromatopsia or Macular dystrophies or degeneration, Retinitis Pigmentosa, Achromatopsia, and age related macular degeneration. In an embodiment, the retinal degenerative disease is Leber Congenital Amaurosis (LCA) or Retinitis Pigmentosa. Other exemplary eye diseases are described in greater detail elsewhere herein.

[0562] In an embodiment, the composition, system, is delivered to the eye, optionally via intravitreal injection or subretinal injection. Intraocular injections may be performed with the aid of an operating microscope. For subretinal and intravitreal injections, eyes may be prolapsed by gentle digital pressure and fundi visualized using a contact lens system consisting of a drop of a coupling medium solution on the cornea covered with a glass microscope slide coverslip. For subretinal injections, the tip of a 10-mm 34-gauge needle, mounted on a 5-μl Hamilton syringe may be advanced under direct visualization through the superior equatorial sclera tangentially towards the posterior pole until the aperture of the needle was visible in the subretinal space. Then, 2 μl of vector suspension may be injected to produce a superior bullous retinal detachment, thus confirming subretinal vector administration. This approach creates a self-sealing sclerotomy allowing the vector suspension to be retained in the subretinal space until it is absorbed by the RPE, usually within 48 h of the procedure. This procedure may be repeated in the inferior hemisphere to produce an inferior retinal detachment. This technique results in the exposure of approximately 70% of neurosensory retina and RPE to the vector suspension. For intravitreal injections, the needle tip may be advanced through the sclera 1 mm posterior to the corneoscleral limbus and 2 μl of vector suspension injected into the vitreous cavity. For intracameral injections, the needle tip may be advanced through a corneoscleral limbal paracentesis, directed towards the central cornea, and 2 μl of vector suspension may be injected. For intracameral injections, the needle tip may be advanced through a corneoscleral limbal paracentesis, directed towards the central cornea, and 2 μl of vector suspension may be injected. These vectors may be injected at titers of either 1.0-1.4×10¹⁰ or 1.0-1.4×10⁹ transducing units (TU)/ml.

[0563] In an embodiment, for administration to the eye, lentiviral vectors. In an embodiment, the lentiviral vector is an equine infectious anemia virus (EIAV) vector. Exemplary EIAV vectors for eye delivery are described in Balagaan, J Gene Med 2006; 8:275-285, Published online 21 Nov. 2005 in Wiley InterScience (www.interscience.wiley.com). DOI: 10.1002/jgm.845; Binley et al., HUMAN GENE THERAPY 23:980-991 (September 2012), which can be adapted for use with the composition, system, described herein. In an embodiment, the dosage can be 1.1×10⁵ transducing units per eye (TU/eye) in a total volume of 100 μl.

[0564] Other viral vectors can also be used for delivery to the eye, such as AAV vectors, such as those described in Campochiaro et al., Human Gene Therapy 17:167-176 (February 2006), Millington-Ward et al. (Molecular Therapy, vol. 19 no. 4, 642-649 April 2011; Dalkara et al. (Sci Transl Med 5, 189ra76 (2013)), which can be adapted for use with the composition, system, described herein. In an embodiment, the dose can range from about 10⁶ to 10^{9.5} particle units. In the context of the Millington-Ward AAV vectors, a dose of about 2×10¹¹ to about 6×10¹³ virus particles can be administered. In the context of Dalkara vectors, a dose of about 1×10¹⁵ to about 1×10¹⁶ vg/ml administered to a human.

[0565] In an embodiment, the sd-rxRNA® system of RXi Pharmaceuticals may be used/and or adapted for delivering composition, system, to the eye. In this system, a single intravitreal administration of 3 μg of sd-rxRNA results in sequence-specific reduction of PPIB mRNA levels for 14 days. The sd-rxRNA® system may be applied to the nucleic acid-targeting system of the present invention, contemplating a dose of about 3 to 20 mg of CRISPR administered to a human.

[0566] In other embodiments, the methods of US Patent Publication No. 20130183282, which is directed to methods of cleaving a target sequence from the human rhodopsin gene, may also be modified to the nucleic acid-targeting system of the present invention.

[0567] In other embodiments, the methods of US Patent Publication No. 20130202678 for treating retinopathies and sight-threatening ophthalmologic disorders relating to delivering of the Puf-A gene (which is expressed in retinal ganglion and pigmented cells of eye tissues and displays a unique anti-apoptotic activity) to the sub-retinal or intravitreal space in the eye. In particular, desirable targets are zgc: 193933, prdm1a, spata2, tex10, rbb4, ddx3, zp2.2, Blimp-1 and HtrA2, all of which may be targeted by the composition, system, of the present invention.

[0568] Wu (Cell Stem Cell, 13:659-62, 2013) designed a guide RNA that led Cas9 to a single base pair mutation that causes cataracts in mice, where it induced DNA cleavage. Then using either the other wild-type allele or oligos given to the zygotes repair mechanisms corrected the sequence of the broken allele and corrected the cataract-causing genetic defect in mutant mouse. This approach can be adapted to and/or applied to the compositions, systems, described herein.

[0569] US Patent Publication No. 20120159653, describes use of zinc finger nucleases to genetically modify cells, animals and proteins associated with macular degeneration (MD), the teachings of which can be applied to and/or adapted for the compositions, systems, described herein.

[0570] One aspect of US Patent Publication No. 20120159653 relates to editing of any chromosomal sequences that encode proteins associated with MD which may be applied to the nucleic acid-targeting system of the present invention.

### Treating Muscle Diseases and Cardiovascular Diseases

[0571] In an embodiment, the composition, system, can be used to treat and/or prevent a muscle disease and associated circulatory or cardiovascular disease or disorder. The present invention also contemplates delivering the composition, system, described herein, e.g., Cas effector protein systems, to the heart. For the heart, a myocardium tropic adeno-associated virus (AAVM) is preferred, in particular AAVM41 which showed preferential gene transfer in the heart (see, e.g., Lin-Yanga et al., PNAS, Mar. 10, 2009, vol. 106, no. 10). Administration may be systemic or local. A dosage of about 1-10×10¹⁴ vector genomes is contemplated for systemic administration. See also, e.g., Eulalio et al. (2012) Nature 492:376 and Somasuntharam et al. (2013) Biomaterials 34:7790, the teachings of which can be adapted for and/or applied to the compositions, systems, described herein.

[0572] For example, US Patent Publication No. 20110023139, the teachings of which can be adapted for and/or applied to the compositions, systems, described herein describes use of zinc finger nucleases to genetically modify cells, animals and proteins associated with cardiovascular disease. Cardiovascular diseases generally include high blood pressure, heart attacks, heart failure, and stroke and TIA. Any chromosomal sequence involved in cardiovascular disease or the protein encoded by any chromosomal sequence involved in cardiovascular disease may be utilized in the methods described in this disclosure. The cardiovascular-related proteins are typically selected based on an experimental association of the cardiovascular-related protein to the development of cardiovascular disease. For example, the production rate or circulating concentration of a cardiovascular-related protein may be elevated or depressed in a population having a cardiovascular disorder relative to a population lacking the cardiovascular disorder. Differences in protein levels may be assessed using proteomic techniques including but not limited to Western blot, immunohistochemical staining, enzyme linked immunosorbent assay (ELISA), and mass spectrometry. Alternatively, the cardiovascular-related proteins may be identified by obtaining gene expression profiles of the genes encoding the proteins using genomic techniques including but not limited to DNA microarray analysis, serial analysis of gene expression (SAGE), and quantitative real-time polymerase chain reaction (Q-PCR). Exemplary chromosomal sequences can be found in Table 3.

[0573] The compositions, systems, herein can be used for treating diseases of the muscular system. The present invention also contemplates delivering the composition, system, described herein, e.g., Cas (e.g. Cas9 and/or Cas12) effector protein systems, to muscle(s).

[0574] In an embodiment, the muscle disease to be treated is a muscle dystrophy such as DMD. In an embodiment, the composition, system, such as a system capable of RNA modification, described herein can be used to achieve exon skipping to achieve correction of the diseased gene. As used herein, the term “exon skipping” refers to the modification of pre-mRNA splicing by the targeting of splice donor and/or acceptor sites within a pre-mRNA with one or more complementary antisense oligonucleotide(s) (AONs). By blocking access of a spliceosome to one or more splice donor or acceptor site, an AON may prevent a splicing reaction thereby causing the deletion of one or more exons from a fully processed mRNA. Exon skipping may be achieved in the nucleus during the maturation process of pre-mRNAs. In some examples, exon skipping may include the masking of key sequences involved in the splicing of targeted exons by using a composition, system, described herein capable of RNA modification. In an embodiment, exon skipping can be achieved in dystrophin mRNA. In an embodiment, the composition, system, can induce exon skipping at exon 1, 2, 3, 4, 5, 6, 7, 8, 10, 11, 12, 13, 14, 15, 16, 17, 18, 19, 20, 21, 22, 23, 24, 25, 26, 27, 28, 29, 30, 31, 32, 33, 34, 45, 36, 37, 38, 39, 40, 41, 42, 43, 44, 45, 46, 47, 48, 49, 50, 51, 52, 53, 54, 55, 56, 57, 58, 59, 60, 61, 62, 63, 64, 65, 66, 67, 68, 69, 70, 71, 72, 73, 74, 75, 76, 77, 78, 79, or any combination thereof of the dystrophin mRNA. In an embodiment, the composition, system, can induce exon skipping at exon 43, 44, 50, 51, 52, 55, or any combination thereof of the dystrophin mRNA. Mutations in these exons, can also be corrected using non-exon skipping polynucleotide modification methods.

[0575] In an embodiment, for treatment of a muscle disease, the method of Bortolanza et al. Molecular Therapy vol. 19 no. 11, 2055-264 November 2011) may be applied to an AAV expressing CRISPR Cas and injected into humans at a dosage of about 2× 1015 or 2× 1016 vg of vector. The teachings of Bortolanza et al., can be adapted for and/or applied to the compositions, systems, described herein.

[0576] In an embodiment, the method of Dumonceaux et al. (Molecular Therapy vol. 18 no. 5, 881-887 May 2010) may be applied to an AAV expressing CRISPR Cas and injected into humans, for example, at a dosage of about 1014 to about 1015 vg of vector. The teachings of Dumonceaux described herein can be adapted for and/or applied to the compositions, systems, described herein.

[0577] In an embodiment, the method of Kinouchi et al. (Gene Therapy (2008) 15, 1126-1130) may be applied to CRISPR Cas systems described herein and injected into a human, for example, at a dosage of about 500 to 1000 ml of a 40 μM solution into the muscle.

[0578] In an embodiment, the method of Hagstrom et al. (Molecular Therapy Vol. 10, No. 2, August 2004) can be adapted for and/or applied to the compositions, systems, herein and injected at a dose of about 15 to about 50 mg into the great saphenous vein of a human.

### Treating Diseases of the Liver and Kidney

[0579] In an embodiment, the composition, system, or component thereof described herein can be used to treat a disease of the kidney or liver. Thus, in an embodiment, delivery of the CRISRP-Cas system or component thereof described herein is to the liver or kidney.

[0580] Delivery strategies to induce cellular uptake of the therapeutic nucleic acid include physical force or vector systems such as viral-, lipid- or complex-based delivery, or nanocarriers. From the initial applications with less possible clinical relevance, when nucleic acids were addressed to renal cells with hydrodynamic high-pressure injection systemically, a wide range of gene therapeutic viral and non-viral carriers have been applied already to target posttranscriptional events in different animal kidney disease models in vivo (Csaba Révész and Péter Hamar (2011). Delivery Methods to Target RNAs in the Kidney, Gene Therapy Applications, Prof. Chunsheng Kang (Ed.), ISBN: 978-953-307-541-9, InTech, Available from: www.intechopen.com/books/gene-therapy-applications/delivery-methods-to-target-rnas-inthe-kidney). Delivery methods to the kidney may include those in Yuan et al. (Am J Physiol Renal Physiol 295: F605-F617, 2008). The method of Yuang et al. may be applied to the CRISPR Cas system of the present invention contemplating a 1-2 g subcutaneous injection of CRISPR Cas conjugated with cholesterol to a human for delivery to the kidneys. In an embodiment, the method of Molitoris et al. (J Am Soc Nephrol 20:1754-1764, 2009) can be adapted to the CRISRP-Cas system of the present invention and a cumulative dose of 12-20 mg/kg to a human can be used for delivery to the proximal tubule cells of the kidneys. In an embodiment, the methods of Thompson et al. (Nucleic Acid Therapeutics, Volume 22, Number 4, 2012) can be adapted to the CRISRP-Cas system of the present invention and a dose of up to 25 mg/kg can be delivered via i.v. administration. In an embodiment, the method of Shimizu et al. (J Am Soc Nephrol 21:622-633, 2010) can be adapted to the CRISRP-Cas system of the present invention and a dose of about of 10-20 μmol CRISPR Cas complexed with nanocarriers in about 1-2 liters of a physiologic fluid for i.p. administration can be used.

[0581] Other various delivery vehicles can be used to deliver the composition, system, to the kidney such as viral, hydrodynamic, lipid, polymer nanoparticles, aptamers and various combinations thereof (see e.g., Larson et al., Surgery, (August 2007), Vol. 142, No. 2, pp. (262-269); Hamar et al., Proc Natl Acad Sci, (October 2004), Vol. 101, No. 41, pp. (14883-14888); Zheng et al., Am J Pathol, (October 2008), Vol. 173, No. 4, pp. (973-980); Feng et al., Transplantation, (May 2009), Vol. 87, No. 9, pp. (1283-1289); Q. Zhang et al., PloS ONE, (July 2010), Vol. 5, No. 7, e11709, pp. (1-13); Kushibikia et al., J Controlled Release, (July 2005), Vol. 105, No. 3, pp. (318-331); Wang et al., Gene Therapy, (July 2006), Vol. 13, No. 14, pp. (1097-1103); Kobayashi et al., Journal of Pharmacology and Experimental Therapeutics, (February 2004), Vol. 308, No. 2, pp. (688-693); Wolfrum et al., Nature Biotechnology, (September 2007), Vol. 25, No. 10, pp. (1149-1157); Molitoris et al., J Am Soc Nephrol, (August 2009), Vol. 20, No. 8 pp. (1754-1764); Mikhaylova et al., Cancer Gene Therapy, (March 2011), Vol. 16, No. 3, pp. (217-226); Y. Zhang et al., J Am Soc Nephrol, (April 2006), Vol. 17, No. 4, pp. (1090-1101); Singhal et al., Cancer Res, (May 2009), Vol. 69, No. 10, pp. (4244-4251); Malek et al., Toxicology and Applied Pharmacology, (April 2009), Vol. 236, No. 1, pp. (97-108); Shimizu et al., J Am Soc Nephrology, (April 2010), Vol. 21, No. 4, pp. (622-633); Jiang et al., Molecular Pharmaceutics, (May-June 2009), Vol. 6, No. 3, pp. (727-737); Cao et al, J Controlled Release, (June 2010), Vol. 144, No. 2, pp. (203-212); Ninichuk et al., Am J Pathol, (March 2008), Vol. 172, No. 3, pp. (628-637); Purschke et al., Proc Natl Acad Sci, (March 2006), Vol. 103, No. 13, pp. (5173-5178).

[0582] In an embodiment, delivery is to liver cells. In an embodiment, the liver cell is a hepatocyte. Delivery of the composition and system herein may be via viral vectors, especially AAV (and in particular AAV2/6) vectors. These can be administered by intravenous injection. A preferred target for the liver, whether in vitro or in vivo, is the albumin gene. This is a so-called ‘safe harbor” as albumin is expressed at very high levels and so some reduction in the production of albumin following successful gene editing is tolerated. It is also preferred as the high levels of expression seen from the albumin promoter/enhancer allows for useful levels of correct or transgene production (from the inserted donor template) to be achieved even if only a small fraction of hepatocytes are edited. See sites identified by Wechsler et al. (reported at the 57th Annual Meeting and Exposition of the American Society of Hematology-abstract available online at ash.confex.com/ash/2015/webprogram/Paper86495.html and presented on 6 Dec. 2015) which can be adapted for use with the compositions, systems, herein.

[0583] Exemplary liver and kidney diseases that can be treated and/or prevented are described elsewhere herein.

### Treating Epithelial and Lung Diseases

[0584] In an embodiment, the disease treated or prevented by the composition, system, described herein can be a lung or epithelial disease. The compositions, systems, described herein can be used for treating epithelial and/or lung diseases. The present invention also contemplates delivering the composition, system, described herein, to one or both lungs.

[0585] In an embodiment, as viral vector can be used to deliver the composition, system, or component thereof to the lungs. In an embodiment, the AAV is an AAV-1, AAV-2, AAV-5, AAV-6, and/or AAV-9 for delivery to the lungs. (see, e.g., Li et al., Molecular Therapy, vol. 17 no. 12, 2067-277 December 2009). In an embodiment, the MOI can vary from 1×10³ to 4×10⁵ vector genomes/cell. In an embodiment, the delivery vector can be an RSV vector as in Zamora et al. (Am J Respir Crit Care Med Vol 183. pp 531-538, 2011. The method of Zamora et al. may be applied to the nucleic acid-targeting system of the present invention and an aerosolized CRISPR Cas, for example with a dosage of 0.6 mg/kg, may be contemplated for the present invention.

[0586] Subjects treated for a lung disease may for example receive pharmaceutically effective amount of aerosolized AAV vector system per lung endobronchially delivered while spontaneously breathing. As such, aerosolized delivery is preferred for AAV delivery in general. An adenovirus or an AAV particle may be used for delivery. Suitable gene constructs, each operably linked to one or more regulatory sequences, may be cloned into the delivery vector. In this instance, the following constructs are provided as examples: Cbh or EF1a promoter for Cas (Cas (e.g. Cas9 and/or Cas12)), U6 or H1 promoter for guide RNA): A preferred arrangement is to use a CFTRdelta508 targeting guide, a repair template for deltaF508 mutation and a codon optimized Cas (e.g. Cas9 and/or Cas12) enzyme, with optionally one or more nuclear localization signal or sequence(s) (NLS(s)), e.g., two (2) NLSs.

### Treating Diseases of the Skin

[0587] The compositions, systems, described herein can be used for the treatment of skin diseases. The present invention also contemplates delivering the composition, system, described herein, to the skin.

[0588] In an embodiment, delivery to the skin (intradermal delivery) of the composition, system, or component thereof can be via one or more microneedles or microneedle containing device. For example, in an embodiment the device and methods of Hickerson et al. (Molecular Therapy—Nucleic Acids (2013) 2, e129) can be used and/or adapted to deliver the composition, system, described herein, for example, at a dosage of up to 300 μl of 0.1 mg/ml CRISPR-Cas (e.g. Cas9 and/or Cas12) system to the skin.

[0589] In an embodiment, the methods and techniques of Leachman et al. (Molecular Therapy, vol. 18 no. 2, 442-446 February 2010) can be used and/or adapted for delivery of a CIRPSR-Cas system described herein to the skin.

[0590] In an embodiment, the methods and techniques of Zheng et al. (PNAS, Jul. 24, 2012, vol. 109, no. 30, 11975-11980) can be used and/or adapted for nanoparticle delivery of a CIRPSR-Cas system described herein to the skin. In an embodiment, as dosage of about 25 nM applied in a single application can achieve gene knockdown in the skin.

### Treating Cancer

[0591] The compositions, systems, described herein can be used for the treatment of cancer. The present invention also contemplates delivering the composition, system, described herein, to a cancer cell. Also, as is described elsewhere herein the compositions, systems, can be used to modify an immune cell, such as a CAR or CAR T cell, which can then in turn be used to treat and/or prevent cancer. This is also described in WO2015161276, the disclosure of which is hereby incorporated by reference and described herein below.

[0592] Target genes suitable for the treatment or prophylaxis of cancer can include those set forth in Tables 4 and 5. In an embodiment, target genes for cancer treatment and prevention can also include those described in WO2015048577 the disclosure of which is hereby incorporated by reference and can be adapted for and/or applied to the composition, system, described herein.

### Diseases

Genetic Diseases and Diseases with a Genetic and/or Epigenetic Aspect

[0593] The compositions, systems, or components thereof can be used to treat and/or prevent a genetic disease or a disease with a genetic and/or epigenetic aspect. The genes and conditions exemplified herein are not exhaustive. In an embodiment, a method of treating and/or preventing a genetic disease can include administering a composition, system, and/or one or more components thereof to a subject, where the composition, system, and/or one or more components thereof is capable of modifying one or more copies of one or more genes associated with the genetic disease or a disease with a genetic and/or epigenetic aspect in one or more cells of the subject. In an embodiment, modifying one or more copies of one or more genes associated with a genetic disease or a disease with a genetic and/or epigenetic aspect in the subject can eliminate a genetic disease or a symptom thereof in the subject. In an embodiment, modifying one or more copies of one or more genes associated with a genetic disease or a disease with a genetic and/or epigenetic aspect in the subject can decrease the severity of a genetic disease or a symptom thereof in the subject. In an embodiment, the compositions, systems, or components thereof can modify one or more genes or polynucleotides associated with one or more diseases, including genetic diseases and/or those having a genetic aspect and/or epigenetic aspect, including but not limited to, any one or more set forth in Table 4. It will be appreciated that those diseases and associated genes listed herein are non-exhaustive and non-limiting. Further some genes play roles in the development of multiple diseases.

TABLE 4
Exemplary Genetic and Other Diseases and Associated Genes

| | Primary Tissues | Additional Tissues/ | |
|---|---|---|---|
| Disease Name | or System Affected | Systems Affected | Genes |
| Achondroplasia | Bone and | | fibroblast growth factor receptor 3 |
| | Muscle | | (FGFR3) |
| Achromatopsia | eye | | CNGA3, CNGB3, GNAT2, PDE6C, |
| | | | PDE6H, ACHM2, ACHM3, |
| Acute Renal Injury | kidney | | NFkappaB, AATF, p85alpha, FAS, |
| | | | Apoptosis cascade elements (e.g. |
| | | | FASR, Caspase 2, 3, 4, 6, 7, 8, 9, 10, |
| | | | AKT, TNF alpha, IGF1, IGF1R, |
| | | | RIPK1), p53 |
| Age Related Macular | eye | | Abcr; CCL2; CC2; CP |
| Degeneration | | | (ceruloplasmin); Timp3; cathepsinD; |
| | | | VLDLR, CCR2 |
| AIDS | Immune System | | KIR3DL1, NKAT3, NKB1, AMB11, |
| | | | KIR3DS1, IFNG, CXCL12, SDF1 |
| Albinism (including | Skin, hair, eyes, | | TYR, OCA2, TYRP1, and SLC45A2, |
| oculocutaneous albinism (types | | | SLC24A5 and C10orf11 |
| 1-7) and ocular albinism) | | | |
| Alkaptonuria | Metabolism of | Tissues/organs | HGD |
| | amino acids | where homogentisic | |
| | | acid accumulates, | |
| | | particularly | |
| | | cartilage (joints), | |
| | | heart valves, kidneys | |
| alpha-1 antitrypsin deficiency | Lung | Liver, skin, | SERPINA1, those set forth in |
| (AATD or A1AD) | | vascular system, | WO2017165862, PiZ allele |
| | | kidneys, GI | |
| ALS | CNS | | SOD1; ALS2; ALS3; ALS5; |
| | | | ALS7; STEX; FUS; TARDBP; VEGF |
| | | | (VEGF-a; VEGF-b; VEGF-c); DPP6; |
| | | | NEFH, PTGS1, SLC1A2, TNFRSF10B, |
| | | | PRPH, HSP90AA1, CRIA2, IFNG, |
| | | | AMPA2 S100B, FGF2, AOX1, CS, |
| | | | TXN, RAPHJ1, MAP3K5, NBEAL1, |
| | | | GPX1, ICA1L, RAC1, MAPT, ITPR2, |
| | | | ALS2CR4, GLS, ALS2CR8, CNTFR, |
| | | | ALS2CR11, FOLH1, FAM117B, |
| | | | P4HB, CNTF, SQSTM1, STRADB, |
| | | | NAIP, NLR, YWHAQ, SLC33A1, |
| | | | TRAK2, SCA1, NIF3L1, NIF3, |
| | | | PARD3B, COX8A, CDK15, HECW1, |
| | | | HECT, C2, WW 15, NOS1, MET, |
| | | | SOD2, HSPB1, NEFL, CTSB, ANG, |
| | | | HSPA8, RNase A, VAPB, VAMP, |
| | | | SNCA, alpha HGF, CAT, ACTB, |
| | | | NEFM, TH, BCL2, FAS, CASP3, |
| | | | CLU, SMN1, G6PD, BAX, HSF1, |
| | | | RNF19A, JUN, ALS2CR12, HSPA5, |
| | | | MAPK14, APEX1, TXNRD1, NOS2, |
| | | | TIMP1, CASP9, XIAP, GLG1, EPO, |
| | | | VEGFA, ELN, GDNF, NFE2L2, |
| | | | SLC6A3, HSPA4, APOE, PSMB8, |
| | | | DCTN2, TIMP3, KIFAP3, SLC1A1, |
| | | | SMN2, CCNC, STUB1, ALS2, |
| | | | PRDX6, SYP, CABIN1, CASP1, |
| | | | GART, CDK5, ATXN3, RTN4, |
| | | | C1QB, VEGFC, HTT, PARK7, XDH, |
| | | | GFAP, MAP2, CYCS, FCGR3B, CCS, |
| | | | UBL5, MMP9m SLC18A3, TRPM7, |
| | | | HSPB2, AKT1, DEERL1, CCL2, |
| | | | NGRN, GSR, TPPP3, APAF1, |
| | | | BTBD10, GLUD1, CXCR4, S:C1A3, |
| | | | FLT1, PON1, AR, LIF, ERBB3, |
| | | | :GA:S1, CD44, TP53, TLR3, GRIA1, |
| | | | GAPDH, AMPA, GRIK1, DES, |
| | | | CHAT, FLT4, CHMP2B, BAG1, |
| | | | CHRNA4, GSS, BAK1, KDR, GSTP1, |
| | | | OGG1, IL6 |
| Alzheimer's Disease | Brain | | E1; CHIP; UCH; UBB; Tau; LRP; |
| | | | PICALM; CLU; PS1; |
| | | | SORL1; CR1; VLDLR; UBA1; |
| | | | UBA3; CHIP28; AQP1; UCHL1; |
| | | | UCHL3; APP, AAA, CVAP, AD1, |
| | | | APOE, AD2, DCP1, ACE1, MPO, |
| | | | PACIP1, PAXIP1L, PTIP, A2M, |
| | | | BLMH, BMH, PSEN1, AD3, ALAS2, |
| | | | ABCA1, BIN1, BDNF, BTNL8, |
| | | | C1ORF49, CDH4, CHRNB2, |
| | | | CKLFSF2, CLEC4E, CR1L, CSF3R, |
| | | | CST3, CYP2C, DAPK1, ESR1, |
| | | | FCAR, FCGR3B, FFA2, FGA, GAB2, |
| | | | GALP, GAPDHS, GMPB, HP, HTR7, |
| | | | IDE, IF127, IFI6, IFIT2, IL1RN, IL- |
| | | | 1RA, IL8RA, IL8RB, JAG1, KCNJ15, |
| | | | LRP6, MAPT, MARK4, MPHOSPH1, |
| | | | MTHFR, NBN, NCSTN, NIACR2, |
| | | | NMNAT3, NTM, ORM1, P2RY13, |
| | | | PBEF1, PCK1, PICALM, PLAU, |
| | | | PLXNC1, PRNP, PSEN1, PSEN2, |
| | | | PTPRA, RALGPS2, RGSL2, |
| | | | SELENBP1, SLC25A37, SORL1, |
| | | | Mitoferrin-1, TF, TFAM, TNF, |
| | | | TNFRSF10C, UBEIC |
| Amyloidosis | | | APOA1, APP, AAA, CVAP, AD1, |
| | | | GSN, FGA, LYZ, TTR, PALB |
| Amyloid neuropathy | | | TTR, PALB |
| Anemia | Blood | | CDAN1, CDA1, RPS19, DBA, PKLR, |
| | | | PK1, NT5C3, UMPH1, PSN1, RHAG, |
| | | | RH50A, NRAMP2, SPTB, ALAS2, |
| | | | ANH1, ASB, ABCB7, ABC7, ASAT |
| Angelman Syndrome | Nervous system, | | UBE3A |
| | brain | | |
| Attention Deficit Hyperactivity | Brain | | PTCHD1 |
| Disorder (ADHD) | | | |
| Autoimmune lymphoproliferative | Immune system | | TNFRSF6, APT1, FAS, CD95, |
| syndrome | | | ALPS1A |
| Autism, Autism spectrum | Brain | | PTCHD1; Mecp2; BZRAP1; MDGA2; |
| disorders (ASDs), including | | | Sema5A; Neurexin 1; GLO1, RTT, |
| Asperger's and a general | | | PPMX, MRX16, RX79, NLGN3, |
| diagnostic category called | | | NLGN4, KIAA1260, AUTSX2, |
| Pervasive Developmental | | | FMR1, FMR2; FXR1; FXR2; |
| Disorders (PDDs) | | | MGLUR5, ATP10C, CDH10, GRM6, |
| | | | MGLUR6, CDH9, CNTN4, NLGN2, |
| | | | CNTNAP2, SEMA5A, DHCR7, |
| | | | NLGN4X, NLGN4Y, DPP6, NLGN5, |
| | | | EN2, NRCAM, MDGA2, NRXN1, |
| | | | FMR2, AFF2, FOXP2, OR4M2, |
| | | | OXTR, FXR1, FXR2, PAH, |
| | | | GABRA1, PTEN, GABRA5, PTPRZ1, |
| | | | GABRB3, GABRG1, HIRIP3, |
| | | | SEZ6L2, HOXA1, SHANK3, IL6, |
| | | | SHBZRAP1, LAMB1, SLC6A4, |
| | | | SERT, MAPK3, TAS2R1, MAZ, |
| | | | TSC1, MDGA2, TSC2, MECP2, |
| | | | UBE3A, WNT2, see also |
| | | | 20110023145 |
| autosomal dominant polycystic | kidney | liver | PKD1, PKD2 |
| kidney disease (ADPKD) - | | | |
| (includes diseases such as von | | | |
| Hippel-Lindau disease and | | | |
| tuberous sclerosis complex | | | |
| disease) | | | |
| Autosomal Recessive Polycystic | kidney | liver | PKDH1 |
| Kidney Disease (ARPKD) | | | |
| Ataxia-Telangiectasia (a.k.a | Nervous system, | various | ATM |
| Louis Bar syndrome) | immune system | | |
| B-Cell Non-Hodgkin Lymphoma | | | BCL7A, BCL7 |
| Bardet-Biedl syndrome | Eye, | Liver, ear, | ARL6, BBS1, BBS2, BBS4, BBS5, |
| | musculoskeletal | gastrointestinal | BBS7, BBS9, BBS10, BBS12, |
| | system, kidney, | system, brain | CEP290, INPP5E, LZTFL1, MKKS, |
| | reproductive | | MKS1, SDCCAG8, TRIM32, TTC8 |
| | organs | | |
| Bare Lymphocyte Syndrome | blood | | TAPBP, TPSN, TAP2, ABCB3, PSF2, |
| | | | RING11, MHC2TA, C2TA, RFX5, |
| | | | RFXAP, RFX5 |
| Bartter's Syndrome (types I, II, | kidney | | SLC12A1 (type I), KCNJ1 (type II), |
| III, IVA and B, and V) | | | CLCNKB (type III), BSND (type IV |
| | | | A), or both the CLCNKA CLCNKB |
| | | | genes (type IV B), CASR (type V). |
| Becker muscular dystrophy | Muscle | | DMD, BMD, MYF6 |
| Best Disease (Vitelliform | eye | | VMD2 |
| Macular Dystrophy type 2) | | | |
| Bleeding Disorders | blood | | TBXA2R, P2RX1, P2X1 |
| Blue Cone Monochromacy | eye | | OPN1LW, OPN1MW, and LCR |
| Breast Cancer | Breast tissue | | BRCA1, BRCA2, COX-2 |
| Bruton's Disease (aka X-linked | Immune system, | | BTK |
| Agammglobulinemia) | specifically B | | |
| | cells | | |
| Cancers (e.g., lymphoma, chronic | Various | | FAS, BID, CTLA4, PDCD1, CBLB, |
| lymphocytic leukemia (CLL), B | | | PTPN6, TRAC, TRBC, those |
| cell acute lymphocytic leukemia | | | described in WO2015048577 |
| (B-ALL), acute lymphoblastic | | | |
| leukemia, acute myeloid | | | |
| leukemia, non-Hodgkin's | | | |
| lymphoma (NHL), diffuse large | | | |
| cell lymphoma (DLCL), multiple | | | |
| myeloma, renal cell carcinoma | | | |
| (RCC), neuroblastoma, colorectal | | | |
| cancer, breast cancer, ovarian | | | |
| cancer, melanoma, sarcoma, | | | |
| prostate cancer, lung cancer, | | | |
| esophageal cancer, hepatocellular | | | |
| carcinoma, pancreatic cancer, | | | |
| astrocytoma, mesothelioma, head | | | |
| and neck cancer, and | | | |
| medulloblastoma | | | |
| Cardiovascular Diseases | heart | Vascular system | IL1B, XDH, TP53, PTGS, MB, IL4, |
| | | | ANGPT1, ABCGu8, CTSK, PTGIR, |
| | | | KCNJ11, INS, CRP, PDGFRB, |
| | | | CCNA2, PDGFB, KCNJ5, KCNN3, |
| | | | CAPN10, ADRA2B, ABCG5, |
| | | | PRDX2, CPAN5, PARP14, MEX3C, |
| | | | ACE, RNF, IL6, TNF, STN, |
| | | | SERPINE1, ALB, ADIPOQ, APOB, |
| | | | APOE, LEP, MTHFR, APOA1, |
| | | | EDN1, NPPB, NOS3, PPARG, PLAT, |
| | | | PTGS2, CETP, AGTR1, HMGCR, |
| | | | IGF1, SELE, REN, PPARA, PON1, |
| | | | KNG1, CCL2, LPL, VWF, F2, |
| | | | ICAM1, TGFB, NPPA, IL10, EPO, |
| | | | SOD1, VCAM1, IFNG, LPA, MPO, |
| | | | ESR1, MAPK, HP, F3, CST3, COG2, |
| | | | MMP9, SERPINC1, F8, HMOX1, |
| | | | APOC3, IL8, PROL1, CBS, NOS2, |
| | | | TLR4, SELP, ABCA1, AGT, LDLR, |
| | | | GPT, VEGFA, NR3C2, IL18, NOS1, |
| | | | NR3C1, FGB, HGF, IL1A, AKT1, |
| | | | LIPC, HSPD1, MAPK14, SPP1, |
| | | | ITGB3, CAT, UTS2, THBD, F10, CP, |
| | | | TNFRSF11B, EGFR, MMP2, PLG, |
| | | | NPY, RHOD, MAPK8, MYC, FN1, |
| | | | CMA1, PLAU, GNB3, ADRB2, |
| | | | SOD2, F5, VDR, ALOX5, HLA- |
| | | | DRB1, PARP1, CD40LG, PON2, |
| | | | AGER, IRS1, PTGS1, ECE1, F7, |
| | | | IRMN, EPHX2, IGFBP1, MAPK10, |
| | | | FAS, ABCB1, JUN, IGFBP3, CD14, |
| | | | PDE5A, AGTR2, CD40, LCAT, |
| | | | CCR5, MMP1, TIMP1, ADM, |
| | | | DYT10, STAT3, MMP3, ELN, USF1, |
| | | | CFH, HSPA4, MMP12, MME, F2R, |
| | | | SELL, CTSB, ANXA5, ADRB1, |
| | | | CYBA, FGA, GGT1, LIPG, HIF1A, |
| | | | CXCR4, PROC, SCARB1, CD79A, |
| | | | PLTP, ADD1, FGG, SAA1, KCNH2, |
| | | | DPP4, NPR1, VTN, KIAA0101, FOS, |
| | | | TLR2, PPIG, IL1R1, AR, CYP1A1, |
| | | | SERPINA1, MTR, RBP4, APOA4, |
| | | | CDKN2A, FGF2, EDNRB, ITGA2, |
| | | | VLA-2, CABIN1, SHBG, HMGB1, |
| | | | HSP90B2P, CYP3A4, GJA1, CAV1, |
| | | | ESR2, LTA, GDF15, BDNF, |
| | | | CYP2D6, NGF, SP1, TGIF1, SRC, |
| | | | EGF, PIK3CG, HLA-A, KCNQ1, |
| | | | CNR1, FBN1, CHKA, BEST1, |
| | | | CTNNB1, IL2, CD36, PRKAB1, TPO, |
| | | | ALDH7A1, CX3CR1, TH, F9, CH1, |
| | | | TF, HFE, IL17A, PTEN, GSTM1, |
| | | | DMD, GATA4, F13A1, TTR, FABP4, |
| | | | PON3, APOC1, INSR, TNFRSF1B, |
| | | | HTR2A, CSF3, CYP2C9, TXN, |
| | | | CYP11B2, PTH, CSF2, KDR, |
| | | | PLA2G2A, THBS1, GCG, RHOA, |
| | | | ALDH2, TCF7L2, NFE2L2, |
| | | | NOTCH1, UGT1A1, IFNA1, PPARD, |
| | | | SIRT1, GNHR1, PAPPA, ARR3, |
| | | | NPPC, AHSP, PTK2, IL13, MTOR, |
| | | | ITGB2, GSTT1, IL6ST, CPB2, |
| | | | CYP1A2, HNF4A, SLC64A, |
| | | | PLA2G6, TNFSF11, SLC8A1, F2RL1, |
| | | | AKR1A1, ALDH9A1, BGLAP, |
| | | | MTTP, MTRR, SULT1A3, RAGE, |
| | | | C4B, P2RY12, RNLS, CREB1, |
| | | | POMC, RAC1, LMNA, CD59, |
| | | | SCM5A, CYP1B1, MIF, MMP13, |
| | | | TIMP2, CYP19A1, CUP21A2, |
| | | | PTPN22, MYH14, MBL2, SELPLG, |
| | | | AOC3, CTSL1, PCNA, IGF2, ITGB1, |
| | | | CAST, CXCL12, IGHE, KCNE1, |
| | | | TFRC, COL1A1, COL1A2, IL2RB, |
| | | | PLA2G10, ANGPT2, PROCR, NOX4, |
| | | | HAMP, PTPN11, SLCA1, IL2RA, |
| | | | CCL5, IRF1, CF:AR, CA:CA, EIF4E, |
| | | | GSTP1, JAK2, CYP3A5, HSPG2, |
| | | | CCL3, MYD88, VIP, SOAT1, |
| | | | ADRBK1, NR4A2, MMP8, NPR2, |
| | | | GCH1, EPRS, PPARGC1A, F12, |
| | | | PECAM1, CCL4, CERPINA34, |
| | | | CASR, FABP2, TTF2, PROS1, CTF1, |
| | | | SGCB, YME1L1, CAMP, ZC3H12A, |
| | | | AKR1B1, MMP7, AHR, CSF1, |
| | | | HDAC9, CTGF, KCNMA1, UGTIA, |
| | | | PRKCA, COMT, S100B, EGR1, PRL, |
| | | | IL15, DRD4, CAMK2G, SLC22A2, |
| | | | CCL11, PGF, THPO, GP6, TACR1, |
| | | | NTS, HNF1A, SST, KCDN1, |
| | | | LOC646627, TBXAS1, CUP2J2, |
| | | | TBXA2R, ADH1C, ALOX12, AHSG, |
| | | | BHMT, GJA4, SLC25A4, ACLY, |
| | | | ALOX5AP, NUMA1, CYP27B1, |
| | | | CYSLTR2, SOD3, LTC4S, UCN, |
| | | | GHRL, APOC2, CLEC4A, |
| | | | KBTBD10, TNC, TYMS, SHC1, |
| | | | LRP1, SOCS3, ADH1B, KLK3, |
| | | | HSD11B1, VKORC1, SERPINB2, |
| | | | TNS1, RNF19A, EPOR, ITGAM, |
| | | | PITX2, MAPK7, FCGR3A, LEEPR, |
| | | | ENG, GPX1, GOT2, HRH1, NR112, |
| | | | CRH, HTR1A, VDAC1, HPSE, |
| | | | SFTPD, TAP2, RMF123, PTK2Bm |
| | | | NTRK2, IL6R, ACHE, GLP1R, GHR, |
| | | | GSR, NQO1, NR5A1, GJB2, |
| | | | SLC9A1, MAOA, PCSK9, FCGR2A, |
| | | | SERPINF1, EDN3, UCP2, TFAP2A, |
| | | | C4BPA, SERPINF2, TYMP, ALPP, |
| | | | CXCR2, SLC3A3, ABCG2, ADA, |
| | | | JAK3, HSPA1A, FASN, FGF1, F11, |
| | | | ATP7A, CR1, GFPA, ROCK1, |
| | | | MECP2, MYLK, BCHE, LIPE, |
| | | | ADORA1, WRN, CXCR3, CD81, |
| | | | SMAD7, LAMC2, MAP3K5, CHGA, |
| | | | IAPP, RHO, ENPP1, PTHLH, NRG1, |
| | | | VEGFC, ENPEP, CEBPB, NAGLU, . |
| | | | F2RL3, CX3CL1, BDKRB1, |
| | | | ADAMTS13, ELANE, ENPP2, CISH, |
| | | | GAST, MYOC, ATP1A2, NF1, GJB1, |
| | | | MEF2A, VCL, BMPR2, TUBB, |
| | | | CDC42, KRT18, HSF1, MYB, |
| | | | PRKAA2, ROCK2, TFP1, PRKG1, |
| | | | BMP2, CTNND1, CTH, CTSS, |
| | | | VAV2, NPY2R, IGFBP2, CD28, |
| | | | GSTA1, PPIA, APOH, S100A8, IL11, |
| | | | ALOX15, FBLN1, NR1H3, SCD, GIP, |
| | | | CHGB, PRKCB, SRD5A1, HSD11B2, |
| | | | CALCRL, GALNT2, ANGPTL4, |
| | | | KCNN4, PIK3C2A, HBEGF, |
| | | | CYP7A1, HLA-DRB5, BNIP3, |
| | | | GCKR, S100A12, PADI4, HSPA14, |
| | | | CXCR1, H19, KRTAP19-3, IDDM2, |
| | | | RAC2, YRY1, CLOCK, NGFR, DBH, |
| | | | CHRNA4, CACNA1C, PRKAG2, |
| | | | CHAT, PTGDS, NR1H2, TEK, |
| | | | VEGFB, MEF2C, MAPKAPK2, |
| | | | TNFRSF11A, HSPA9, CYSLTR1, |
| | | | MAT1A, OPRL1, IMPA1, CLCN2, |
| | | | DLD, PSMA6, PSMB8, CHI3L1, |
| | | | ALDHIB1, PARP2, STAR, LBP, |
| | | | ABCC6, RGS2, EFNB2, GJB6, |
| | | | APOA2, AMPD1, DYSF, |
| | | | FDFT1, EMD2, CCR6, GJB3, IL1RL1, |
| | | | ENTPD1, BBS4, CELSR2, F11R, |
| | | | RAPGEF3, HYAL1, ZNF259, |
| | | | ATOXI, ATF6, KHK, SAT1, GGH, |
| | | | TIMP4, SLC4A4, PDE2A, PDE3B, |
| | | | FADS1, FADS2, TMSB4X, TXNIP, |
| | | | LIMS1, RHOB, LY96, FOXO1, |
| | | | PNPLA2, TRH, GJC1, S:C17A5, FTO, |
| | | | GJD2, PRSC1, CASP12, GPBAR1, |
| | | | PXK, IL33, TRIB1, PBX4, NUPR1, |
| | | | 15-SEP, CILP2, TERC, GGT2, |
| | | | MTCO1, UOX, AVP |
| Cataract | eye | | CRYAA, CRYA1, CRYBB2, CRYB2, |
| | | | PITX3, BFSP2, CP49, CP47, CRYAA, |
| | | | CRYA1, PAX6, AN2, MGDA, |
| | | | CRYBA1, CRYB1, CRYGC, CRYG3, |
| | | | CCL, LIM2, MP19, CRYGD, CRYG4, |
| | | | BFSP2, CP49, CP47, HSF4, CTM, |
| | | | HSF4, CTM, MIP, AQP0, CRYAB, |
| | | | CRYA2, CTPP2, CRYBB1, CRYGD, |
| | | | CRYG4, CRYBB2, CRYB2, CRYGC, |
| | | | CRYG3, CCL, CRYAA, CRYA1, |
| | | | GJA8, CX50, CAE1, GJA3, CX46, |
| | | | CZP3, CAE3, CCM1, CAM, KRIT1 |
| CDKL-5 Deficiencies or | Brain, CNS | | CDKL5 |
| Mediated Diseases | | | |
| Charcot-Marie-Tooth (CMT) | Nervous system | Muscles | PMP22 (CMT1A and E), MPZ |
| disease (Types 1, 2, 3, 4, ) | | (dystrophy) | (CMT1B), LITAF (CMT1C), EGR2 |
| | | | (CMT1D), NEFL (CMT1F), GJB1 |
| | | | (CMT1X), MFN2 (CMT2A), KIF1B |
| | | | (CMT2A2B), RAB7A (CMT2B), |
| | | | TRPV4 (CMT2C), GARS (CMT2D), |
| | | | NEFL (CMT2E), GAPD1 (CMT2K), |
| | | | HSPB8 (CMT2L), DYNC1H1, |
| | | | CMT20), LRSAM1 (CMT2P), |
| | | | IGHMBP2 (CMT2S), MORC2 |
| | | | (CMT2Z), GDAP1 (CMT4A), |
| | | | MTMR2 or SBF2/MTMR13 |
| | | | (CMT4B), SH3TC2 (CMT4C), |
| | | | NDRG1 (CMT4D), PRX (CMT4F), |
| | | | FIG4 (CMT4J), NT-3 |
| Chediak-Higashi Syndrome | Immune system | Skin, hair, eyes, | LYST |
| | | neurons | |
| Choroidermia | | | CHM, REP1, |
| Chorioretinal atrophy | eye | | PRDM13, RGR, TEAD1 |
| Chronic Granulomatous Disease | Immune system | | CYBA, CYBB, NCF1, NCF2, NCF4 |
| Chronic Mucocutaneous | Immune system | | AIRE, CARD9, CLEC7A IL12B, |
| Candidiasis | | | IL12B1, IL1F, IL17RA, IL17RC, |
| | | | RORC, STAT1, STAT3, TRAF31P2 |
| Cirrhosis | liver | | KRT18, KRT8, CIRH1A, NAIC, |
| | | | TEX292, KIAA1988 |
| Colon cancer (Familial | Gastrointestinal | | FAP: APC HNPCC: |
| adenomatous polyposis (FAP) | | | MSH2, MLH1, PMS2, SH6, PMS1 |
| and hereditary nonpolyposis | | | |
| colon cancer (HNPCC)) | | | |
| Combined Immunodeficiency | Immune System | | IL2RG, SCIDX1, SCIDX, IMD4); |
| | | | HIV-1 (CCL5, SCYA5, D17S136E, |
| | | | TCP228 |
| Cone(-rod) dystrophy | eye | | AIPL1, CRX, GUA1A, GUCY2D, |
| | | | PITPM3, PROM1, PRPH2, RIMS1, |
| | | | SEMA4A, ABCA4, ADAM9, ATF6, |
| | | | C21ORF2, C8ORF37, CACNA2D4, |
| | | | CDHR1, CERKL, CNGA3, CNGB3, |
| | | | CNNM4, CNAT2, IFT81, KCNV2, |
| | | | PDE6C, PDE6H, POC1B, RAX2, |
| | | | RDH5, RPGRIP1, TTLL5, RetCG1, |
| | | | GUCY2E |
| Congenital Stationary Night | eye | | CABP4, CACNA1F, CACNA2D4, |
| Blindness | | | GNAT1, CPR179, GRK1, GRM6, |
| | | | LRIT3, NYX, PDE6B, RDH5, RHO, |
| | | | RLBP1, RPE65, SAG, SLC24A1, |
| | | | TRPM1, |
| Congenital Fructose Intolerance | Metabolism | | ALDOB |
| Cori's Disease (Glycogen Storage | Various- | | AGL |
| Disease Type III) | wherever | | |
| | glycogen | | |
| | accumulates, | | |
| | particularly | | |
| | liver, heart, | | |
| | skeletal muscle | | |
| Corneal clouding and dystrophy | eye | | APOA1, TGFBI, CSD2, CDGG1, |
| | | | CSD, BIGH3, CDG2, TACSTD2, |
| | | | TROP2, M1S1, VSX1, RINX, PPCD, |
| | | | PPD, KTCN, COL8A2, FECD, |
| | | | PPCD2, PIP5K3, CFD |
| Cornea plana congenital | | | KERA, CNA2 |
| Cri du chat Syndrome, also | | | Deletions involving only band 5p15.2 |
| known as 5p syndrome and cat | | | to the entire short arm of chromosome |
| cry syndrome | | | 5, e.g., CTNND2, TERT, |
| Cystic Fibrosis (CF) | Lungs and | Pancreas, liver, | CTFR, ABCC7, CF, MRP7, SCNN1A, |
| | respiratory | digestive system, | those described in WO2015157070 |
| | system | reproductive system, | |
| | | exocrine, glands, | |
| Diabetic nephropathy | kidney | | Gremlin, 12/15- lipoxygenase, TIM44, |
| Dent Disease (Types 1 and 2) | Kidney | | Type 1: CLCN5, Type 2: ORCL |
| Dentatorubro-Pallidoluysian | CNS, brain, | | Atrophin-1 and Atn1 |
| Atrophy (DRPLA) (aka Haw | muscle | | |
| River and Naito-Oyanagi | | | |
| Disease) | | | |
| Down Syndrome | various | | Chromosome 21 trisomy |
| Drug Addiction | Brain | | Prkce; Drd2; Drd4; ABAT; |
| | | | GRIA2; Grm5; Grin1; Htr1b; Grin2a; |
| | | | Drd3; Pdyn; Gria1 |
| Duane syndrome (Types 1, 2, and | eye | | CHN1, indels on chromosomes 4 and 8 |
| 3, including subgroups A, B and | | | |
| C). Other names for this | | | |
| condition include: Duane's | | | |
| Retraction Syndrome (or DR | | | |
| syndrome), Eye Retraction | | | |
| Syndrome, Retraction Syndrome, | | | |
| Congenital retraction syndrome | | | |
| and Stilling-Turk-Duane | | | |
| Syndrome | | | |
| Duchenne muscular dystrophy | muscle | Cardiovascular, | DMD, BMD, dystrophin gene, intron |
| (DMD) | | respiratory | flanking exon 51 of DMD gene, exon |
| | | | 51 mutations in DMD gene, see also |
| | | | WO2013163628 and US Pat. Pub. |
| | | | 20130145487 |
| Edward's Syndrome | | | Complete or partial trisomy of |
| (Trisomy 18) | | | chromosome 18 |
| Ehlers-Danlos Syndrome (Types | Various | | COL5A1, COL5A2, COL1A1, |
| I-VI) | depending on | | COL3A1, TNXB, PLOD1, COL1A2, |
| | type: including | | FKBP14 and ADAMTS2 |
| | musculoskeletal, | | |
| | eye, vasculature, | | |
| | immune, and skin | | |
| Emery-Dreifuss muscular | muscle | | LMNA, LMN1, EMD2, FPLD, |
| dystrophy | | | CMD1A, HGPS, LGMD1B, LMNA, |
| | | | LMN1, EMD2, FPLD, CMD1A |
| Enhanced S-Cone Syndrome | eye | | NR2E3, NRL |
| Fabry's Disease | Various - | | GLA |
| | including skin, | | |
| | eyes, and | | |
| | gastrointestinal | | |
| | system, kidney, | | |
| | heart, brain, | | |
| | nervous system | | |
| Facioscapulohumeral muscular | muscles | | FSHMD1A, FSHD1A, FRG1, |
| dystrophy | | | |
| Factor H and Factor H-like 1 | blood | | HF1, CFH, HUS |
| Factor V Leiden thrombophilia | blood | | Factor V (F5) |
| and Factor V deficiency | | | |
| Factor V and Factor VII | blood | | MCFD2 |
| deficiency | | | |
| Factor VII deficiency | blood | | F7 |
| Factor X deficiency | blood | | F10 |
| Factor XI deficiency | blood | | F11 |
| Factor XII deficiency | blood | | F12, HAF |
| Factor XIIIA deficiency | blood | | F13A1, F13A |
| Factor XIIIB deficiency | blood | | F13B |
| Familial Hypercholestereolemia | Cardiovascular | | APOB, LDLR, PCSK9 |
| | system | | |
| Familial Mediterranean Fever | Various- | Heart, kidney, | MEFV |
| (FMF) also called recurrent | organs/tissues | brain/CNS, | |
| polyserositis or familial | with serous or | reproductive | |
| paroxysmal polyserositis | synovial | organs | |
| | membranes, | | |
| | skin, joints | | |
| Fanconi Anemia | Various - blood | | FANCA, FACA, FA1, FA, FAA, |
| | (anemia), | | FAAP95, FAAP90, FLJ34064, |
| | immune system, | | FANCC, FANCG, RAD51, BRCA1, |
| | cognitive, | | BRCA2, BRIP1, BACH1, FANCJ, |
| | kidneys, eyes, | | FANCB, FANCD1, FANCD2, |
| | musculoskeletal | | FANCD, FAD, FANCE, FACE, |
| | | | FANCF, FANCI, ERCC4, FANCL, |
| | | | FANCM, PALB2, RAD51C, SLX4, |
| | | | UBE2T, FANCB, XRCC9, PHF9, |
| | | | KIAA1596 |
| Fanconi Syndrome Types I | kidneys | | FRTS1, GATM |
| (Childhood onset) and II (Adult | | | |
| Onset) | | | |
| Fragile X syndrome and related | brain | | FMR1, FMR2; FXR1; FXR2; |
| disorders | | | mGLUR5 |
| Fragile XE Mental Retardation | Brain, nervous | | FMR1 |
| (aka Martin Bell syndrome) | system | | |
| Friedreich Ataxia (FRDA) | Brain, nervous | heart | FXN/X25 |
| | system | | |
| Fuchs endothelial corneal | Eye | | TCF4; COL8A2 |
| dystrophy | | | |
| Galactosemia | Carbohydrate | Various-where | GALT, GALK1, and GALE |
| | metabolism | galactose | |
| | disorder | accumulates - | |
| | | liver, brain, eyes | |
| Gastrointestinal Epithelial | | | CISH |
| Cancer, GI cancer | | | |
| Gaucher Disease (Types 1, 2, and | Fat metabolism | Various-liver, | GBA |
| 3, as well as other unusual forms | disorder | spleen, blood, | |
| that may not fit into these types) | | CNS, skeletal | |
| | | system | |
| Griscelli syndrome | | | |
| Glaucoma | eye | | MYOC, TIGR, GLC1A, JOAG, |
| | | | GPOA, OPTN, GLC1E, FIP2, HYPL, |
| | | | NRP, CYP1B1, GLC3A, OPA1, NTG, |
| | | | NPG, CYP1B1, GLC3A, those |
| | | | described in WO2015153780 |
| Glomerulo sclerosis | kidney | | CC chemokine ligand 2 |
| Glycogen Storage Diseases | Metabolism | | SLC2A2, GLUT2, G6PC, G6PT, |
| Types I-VI -See also Cori's | Diseases | | G6PT1, GAA, LAMP2, LAMPB, |
| Disease, Pompe's Disease, | | | AGL, GDE, GBE1, GYS2, PYGL, |
| McArdle's disease, Hers Disease, | | | PFKM, see also Cori's Disease, |
| and Von Gierke's disease | | | Pompe's Disease, McArdle's disease, |
| | | | Hers Disease, and Von Gierke's |
| | | | disease |
| RBC Glycolytic enzyme | blood | | any mutations in a gene for an enzyme |
| deficiency | | | in the glycolysis pathway including |
| | | | mutations in genes for hexokinases I |
| | | | and II, glucokinase, phosphoglucose |
| | | | isomerase, phosphofructokinase, |
| | | | aldolase Bm triosephosphate |
| | | | isomerease, glyceraldehydee-3- |
| | | | phosphate dehydrogenase, |
| | | | phosphoglycerokinase, |
| | | | phosphoglycerate mutase, enolase I, |
| | | | pyruvate kinase |
| Hartnup's disease | Malabsorption | Various- brain, | SLC6A19 |
| | disease | gastrointestinal, | |
| | | skin. | |
| Hearing Loss | ear | | NOX3, Hes5, BDNF, |
| Hemochromatosis (HH) | Iron absorption | Various- | HFE and H63D |
| | regulation | wherever iron | |
| | disease | accumulates, | |
| | | liver, heart, | |
| | | pancreas, joints, | |
| | | pituitary gland | |
| Hemophagocytic | blood | | PRF1, HPLH2, UNC13D, MUNC13- |
| lymphohistiocytosis disorders | | | 4, HPLH3, HLH3, FHL3 |
| Hemorrhagic disorders | blood | | PI, ATT, F5 |
| Hers disease (Glycogen storage | liver | muscle | PYGL |
| disease Type VI) | | | |
| Hereditary angioedema (HAE) | | | kalikrein B1 |
| Hereditary Hemorrhagic | Skin and | | ACVRL1, ENG and SMAD4 |
| Telangiectasia (Osler-Weber- | mucous | | |
| Rendu Syndrome) | membranes | | |
| Hereditary Spherocytosis | blood | | NK1, EPB42, SLC4A1, SPTA1, and |
| | | | SPTB |
| Hereditary Persistence of Fetal | blood | | HBG1, HBG2, BCL11A, promoter |
| Hemoglobin | | | region of HBG 1 and/or 2 (in the |
| | | | CCAAT box) |
| Hemophilia (hemophilia A | blood | | A: FVIII, F8C, HEMA |
| (Classic) a B (aka Christmas | | | B: FVIX, HEMB |
| disease) and C) | | | C: F9, F11 |
| Hepatic adenoma | liver | | TCF1, HNF1A, MODY3 |
| Hepatic failure, early onset, and | liver | | SCOD1, SCO1 |
| neurologic disorder | | | |
| Hepatic lipase deficiency | liver | | LIPC |
| Hepatoblastoma, cancer and | liver | | CTNNB1, PDGFRL, PDGRL, PRLTS, |
| carcinomas | | | AXIN1, AXIN, CTNNB1, TP53, P53, |
| | | | LFS1, IGF2R, MPRI, MET, CASP8, |
| | | | MCH5 |
| Hermansky-Pudlak syndrome | Skin, eyes, | | HPS1, HPS3, HPS4, HPS5, HPS6, |
| | blood, lung, | | HPS7, DTNBP1, BLOC1, BLOC1S2, |
| | kidneys, | | BLOC3 |
| | intestine | | |
| HIV susceptibility or infection | Immune system | | IL10, CSIF, CMKBR2, CCR2, |
| | | | CMKBR5, CCCKR5 (CCR5), those in |
| | | | WO2015148670A1 |
| Holoprosencephaly (HPE) | brain | | ACVRL1, ENG, SMAD4 |
| (Alobar, Semilobar, and Lobar) | | | |
| Homocystinuria | Metabolic | Various- | CBS, MTHFR, MTR, MTRR, and |
| | disease | connective | MMADHC |
| | | tissue, muscles, | |
| | | CNS, | |
| | | cardiovascular | |
| | | system | |
| HPV | | | HPV16 and HPV18 E6/E7 |
| HSV1, HSV2, and related | eye | | HSV1 genes (immediate early and late |
| keratitis | | | HSV-1 genes (UL1, 1.5, 5, 6, 8, 9, 12, |
| | | | 15, 16, 18, 19, 22, 23, 26, 26.5, 27, 28, |
| | | | 29, 30, 31, 32, 33, 34, 35, 36, 37, 38, |
| | | | 42, 48, 49.5, 50, 52, 54, S6, RL2, RS1, |
| | | | those described in WO2015153789, |
| | | | WO2015153791 |
| Hunter's Syndrome (aka | Lysosomal | Various- liver, | IDS |
| Mucopolysaccharidosis type II) | storage disease | spleen, eye, | |
| | | joint, heart, | |
| | | brain, skeletal | |
| Huntington's disease (HD) and | Brain, nervous | | HD, HTT, IT15, PRNP, PRIP, JPH3, |
| HD-like disorders | system | | JP3, HDL2, TBP, SCA17, PRKCE; |
| | | | IGF1; EP300; RCOR1; PRKCZ; |
| | | | HDAC4; and TGM2, and those |
| | | | described in WO2013130824, |
| | | | WO2015089354 |
| Hurler's Syndrome (aka | Lysosomal | Various- liver, | IDUA, α-L-iduronidase |
| mucopolysaccharidosis type I H, | storage disease | spleen, eye, | |
| MPS IH) | | joint, heart, | |
| | | brain, skeletal | |
| Hurler-Scheie syndrome (aka | Lysosomal | Various- liver, | IDUA, α-L-iduronidase |
| mucopolysaccharidosis type I H- | storage disease | spleen, eye, | |
| S, MPS I H-S) | | joint, heart, | |
| | | brain, skeletal | |
| hyaluronidase deficiency (aka | Soft and | | HYAL1 |
| MPS IX) | connective | | |
| | tissues | | |
| Hyper IgM syndrome | Immune system | | CD40L |
| Hyper- tension caused renal | kidney | | Mineral corticoid receptor |
| damage | | | |
| Immunodeficiencies | Immune System | | CD3E, CD3G, AICDA, AID, HIGM2, |
| | | | TNFRSF5, CD40, UNG, DGU, |
| | | | HIGM4, TNFSF5, CD40LG, HIGM1, |
| | | | IGM, FOXP3, IPEX, AIID, XPID, |
| | | | PIDX, TNFRSF14B, TACI |
| Inborn errors of metabolism: | Metabolism | Various organs | See also: Carbohydrate metabolism |
| including urea cycle disorders, | diseases, liver | and cells | disorders (e.g., galactosemia), Amino |
| organic acidemias), fatty acid | | | acid Metabolism disorders (e.g., |
| oxidation defects, amino | | | phenylketonuria), Fatty acid |
| acidopathies, carbohydrate | | | metabolism (e.g., MCAD deficiency), |
| disorders, mitochondrial | | | Urea Cycle disorders (e.g. |
| disorders | | | Citrullinemia), Organic acidemias |
| | | | (e.g., Maple Syrup Urine disease), |
| | | | Mitochondrial disorders (e.g., |
| | | | MELAS), peroxisomal disorders (e.g., |
| | | | Zellweger syndrome) |
| Inflammation | Various | | IL-10; IL-1 (IL-1a; IL-1b); IL-13; IL- |
| | | | 17 (IL-17a (CTLA8); IL- |
| | | | 17b; IL-17c; IL-17d; IL-17f); II-23; |
| | | | Cx3cr1; ptpn22; TNFa; |
| | | | NOD2/CARD15 for IBD; IL-6; IL-12 |
| | | | (IL-12a; IL-12b); CTLA4; Cx3cl1 |
| Inflammatory Bowel Diseases | Gastrointestinal | Joints, skin | NOD2, IRGM, LRRK2, ATG5, |
| (e.g. Ulcerative Colitis and | | | ATG16L1, IRGM, GATM, ECM1, |
| Chron's Disease) | | | CDH1, LAMB1, HNF4A, GNA12, |
| | | | IL10, CARD9/15. CCR6, IL2RA, |
| | | | MST1, TNFSF15, REL, STAT3, |
| | | | IL23R, IL12B, FUT2 |
| Interstitial renal fibrosis | kidney | | TGF-β type II receptor |
| Job's Syndrome (aka Hyper IgE | Immune System | | STAT3, DOCK8 |
| Syndrome) | | | |
| Juvenile Retinoschisis | eye | | RS1, XLRS1 |
| Kabuki Syndrome 1 | | | MLL4, KMT2D |
| Kennedy Disease (aka | Muscles, brain, | | SBMA/SMAX1/AR |
| Spinobulbar Muscular Atrophy) | nervous system | | |
| Klinefelter syndrome | Various- | | Extra X chromosome in males |
| | particularly | | |
| | those involved | | |
| | in development | | |
| | of male | | |
| | characteristics | | |
| Lafora Disease | Brain, CNS | | EMP2A and EMP2B |
| Leber Congenital Amaurosis | eye | | CRB1, RP12, CORD2, CRD, CRX, |
| | | | IMPDH1, OTX2, AIPL1, CABP4, |
| | | | CCT2, CEP290, CLUAP1, CRB1, |
| | | | CRX, DTHD1, GDF6, GUCY2D, |
| | | | IFT140, IQCB1, KCNJ13, LCA5, |
| | | | LRAT, NMNAT1, PRPH2, RD3, |
| | | | RDH12, RPE65, RP20, RPGRIP1, |
| | | | SPATA7, TULP1, LCA1, LCA4, |
| | | | GUC2D, CORD6, LCA3, |
| Lesch-Nyhan Syndrome | Metabolism | Various - joints, | HPRT1 |
| | disease | cognitive, brain, | |
| | | nervous system | |
| Leukocyte deficiencies and | blood | | ITGB2, CD18, LCAMB, LAD, |
| disorders | | | EIF2B1, EIF2BA, EIF2B2, EIF2B3, |
| | | | EIF2B5, LVWM, CACH, CLE, |
| | | | EIF2B4 |
| Leukemia | Blood | | TAL1, TCL5, SCL, TAL2, FLT3, |
| | | | NBS1, NBS, ZNFN1A1, IK1, LYF1, |
| | | | HOXD4, HOX4B, BCR, CML, PHL, |
| | | | ALL, ARNT, KRAS2, RASK2, |
| | | | GMPS, AF10, ARHGEF12, LARG, |
| | | | KIAA0382, CALM, CLTH, CEBPA, |
| | | | CEBP, CHIC2, BTL, FLT3, KIT, |
| | | | PBT, LPP, NPM1, NUP214, D9S46E, |
| | | | CAN, CAIN, RUNX1, CBFA2, |
| | | | AML1, WHSC1L1, NSD3, FLT3, |
| | | | AF1Q, NPM1, NUMA1, ZNF145, |
| | | | PLZF, PML, MYL, STAT5B, AF10, |
| | | | CALM, CLTH, ARL11, ARLTS1, |
| | | | P2RX7, P2X7, BCR, CML, PHL, |
| | | | ALL, GRAF, NF1, VRNF, WSS, |
| | | | NFNS, PTPN11, PTP2C, SHP2, NS1, |
| | | | BCL2, CCND1, PRAD1, BCL1, |
| | | | TCRA, GATA1, GF1, ERYF1, NFE1, |
| | | | ABL1, NQO1, DIA4, NMOR1, |
| | | | NUP214, D9S46E, CAN, CAIN |
| Limb-girdle muscular dystrophy | muscle | | LGMD |
| diseases | | | |
| Lowe syndrome | brain, eyes, | | OCRL |
| | kidneys | | |
| Lupus glomerulo- nephritis | kidney | | MAPK1 |
| Machado- | Brain, CNS, | | ATX3 |
| Joseph's Disease (also known as | muscle | | |
| Spinocerebellar ataxia Type 3) | | | |
| Macular degeneration | eye | | ABC4, CBC1, CHM1, APOE, |
| | | | C1QTNF5, C2, C3, CCL2, CCR2, |
| | | | CD36, CFB, CFH, CFHR1, CFHR3, |
| | | | CNGB3, CP, CRP, CST3, CTSD, |
| | | | CX3CR1, ELOVL4, ERCC6, FBLN5, |
| | | | FBLN6, FSCN2, HMCN1, HTRA1, |
| | | | IL6, IL8, PLEKHA1, PROM1, |
| | | | PRPH2, RPGR, SERPING1, TCOF1, |
| | | | TIMP3, TLR3 |
| Macular Dystrophy | eye | | BEST1, C1QTNF5, CTNNA1, |
| | | | EFEMP1, ELOVL4, FSCN2, |
| | | | GUCA1B, HMCN1, IMPG1, OTX2, |
| | | | PRDM13, PROM1, PRPH2, RP1L1, |
| | | | TIMP3, ABCA4, CFH, DRAM2, |
| | | | IMG1, MFSD8, ADMD, STGD2, |
| | | | STGD3, RDS, RP7, PRPH, AVMD, |
| | | | AOFMD, VMD2 |
| Malattia Leventinesse | eye | | EFEMP1, FBLN3 |
| Maple Syrup Urine Disease | Metabolism | | BCKDHA, BCKDHB, and DBT |
| | disease | | |
| Marfan syndrome | Connective | Musculoskeletal | FBN1 |
| | tissue | | |
| Maroteaux-Lamy Syndrome (aka | Musculoskeletal | Liver, spleen | ARSB |
| MPS VI) | system, nervous | | |
| | system | | |
| McArdle's Disease (Glycogen | Glycogen | muscle | PYGM |
| Storage Disease Type V) | storage disease | | |
| Medullary cystic kidney disease | kidney | | UMOD, HNFJ, FJHN, MCKD2, |
| | | | ADMCKD2 |
| Metachromatic leukodystrophy | Lysosomal | Nervous system | ARSA |
| | storage disease | | |
| Methylmalonic acidemia (MMA) | Metabolism | | MMAA, MMAB, MUT, MMACHC, |
| | disease | | MMADHC, LMBRD1 |
| Morquio Syndrome (aka MPS IV | Connective | heart | GALNS |
| A and B) | tissue, skin, | | |
| | bone, eyes | | |
| Mucopolysaccharidosis diseases | Lysosomal | | See also Hurler/Scheie syndrome, |
| (Types I H/S, I H, II, III A B and | storage disease - | | Hurler disease, Sanfillipo syndrome, |
| C, IS, IVA and B, IX, VII, and | affects various | | Scheie syndrome, Morquio syndrome, |
| VI) | organs/tissues | | hyaluronidase deficiency, Sly |
| | | | syndrome, and Maroteaux-Lamy |
| | | | syndrome |
| Muscular Atrophy | muscle | | VAPB, VAPC, ALS8, SMN1, SMA1, |
| | | | SMA2, SMA3, SMA4, BSCL2, |
| | | | SPG17, GARS, SMAD1, CMT2D, |
| | | | HEXB, IGHMBP2, SMUBP2, |
| | | | CATF1, SMARD1 |
| Muscular dystrophy | muscle | | FKRP, MDC1C, LGMD2I, LAMA2, |
| | | | LAMM, LARGE, KIAA0609, |
| | | | MDC1D, FCMD, TTID, MYOT, |
| | | | CAPN3, CANP3, DYSF, LGMD2B, |
| | | | SGCG, LGMD2C, DMDA1, SCG3, |
| | | | SGCA, ADL, DAG2, LGMD2D, |
| | | | DMDA2, SGCB, LGMD2E, SGCD, |
| | | | SGD, LGMD2F, CMD1L, TCAP, |
| | | | LGMD2G, CMD1N, TRIM32, HT2A, |
| | | | LGMD2H, FKRP, MDC1C, LGMD2I, |
| | | | TTN, CMD1G, TMD, LGMD2J, |
| | | | POMT1, CAV3, LGMD1C, SEPN1, |
| | | | SELN, RSMD1, PLEC1, PLTN, EBS1 |
| Myotonic dystrophy (Type 1 and | Muscles | Eyes, heart, | CNBP (Type 2) and DMPK (Type 1) |
| Type 2) | | endocrine | |
| Neoplasia | | | PTEN; ATM; ATR; EGFR; ERBB2; |
| | | | ERBB3; ERBB4; |
| | | | Notch1; Notch2; Notch3; Notch4; |
| | | | AKT; AKT2; AKT3; HIF; |
| | | | HIF1a; HIF3a; Met; HRG; Bcl2; |
| | | | PPAR alpha; PPAR |
| | | | gamma; WT1 (Wilms Tumor); FGF |
| | | | Receptor Family |
| | | | members (5 members: 1, 2, 3, 4, 5); |
| | | | CDKN2a; APC; RB |
| | | | (retinoblastoma); MEN1; VHL; |
| | | | BRCA1; BRCA2; AR |
| | | | (Androgen Receptor); TSG101; IGF; |
| | | | IGF Receptor; Igf1 (4 |
| | | | variants); Igf2 (3 variants); Igf 1 |
| | | | Receptor, Igf 2 Receptor; |
| | | | Bax; Bc12; caspases family (9 |
| | | | members: |
| | | | 1, 2, 3, 4, 6, 7, 8, 9, 12); Kras; Apc |
| Neurofibromatosis (NF) (NF1, | brain, spinal | | NF1, NF2 |
| formerly Recklinghausen's NF, | cord, nerves, | | |
| and NF2) | and skin | | |
| Niemann-Pick Lipidosis (Types | Lysosomal | Various- where | Types A and B: SMPD1; Type C: |
| A, B, and C) | Storage Disease | sphingomyelin | NPC1 or NPC2 |
| | | accumulates, | |
| | | particularly | |
| | | spleen, liver, | |
| | | blood, CNS | |
| Noonan Syndrome | Various - | | PTPN11, SOS1, RAF1 and KRAS |
| | musculoskeletal, | | |
| | heart, eyes, | | |
| | reproductive | | |
| | organs, blood | | |
| Norrie Disease or X-linked | eye | | NDP |
| Familial Exudative | | | |
| Vitreoretinopathy | | | |
| North Carolina Macular | eye | | MCDR1 |
| Dystrophy | | | |
| Osteogenesis imperfecta (OI) | bones, | | COL1A1, COL1A2, CRTAP, P3H |
| (Types I, II, III, IV, V, VI, VII) | musculoskeletal | | |
| Osteopetrosis | bones | | LRP5, BMND1, LRP7, LR3, OPPG, |
| | | | VBCH2, CLCN7, CLC7, OPTA2, |
| | | | OSTM1, GL, TCIRG1, TIRC7, |
| | | | OC116, OPTB1 |
| Patau's Syndrome | Brain, heart, | | Additional copy of chromosome 13 |
| (Trisomy 13) | skeletal system | | |
| Parkinson's disease (PD) | Brain, nervous | | SNCA (PARK1), UCHL1 (PARK 5), |
| | system | | and LRRK2 (PARK8), (PARK3), |
| | | | PARK2, PARK4, PARK7 (PARK7), |
| | | | PINK1 (PARK6); x-Synuclein, DJ-1, |
| | | | Parkin, NR4A2, NURR1, NOT, |
| | | | TINUR, SNCAIP, TBP, SCA17, |
| | | | NCAP, PRKN, PDJ, DBH, NDUFV2 |
| Pattern Dystrophy of the RPE | eye | | RDS/peripherin |
| Phenylketonuria (PKU) | Metabolism | Various due to | PAH, PKU1, QDPR, DHPR, PTS |
| | disorder | build-up of | |
| | | phenylalanine, | |
| | | phenyl ketones | |
| | | in tissues and | |
| | | CNS | |
| Polycystic kidney and hepatic | Kidney, liver | | FCYT, PKHD1, ARPKD, PKD1, |
| disease | | | PKD2, PKD4, PKDTS, PRKCSH, |
| | | | G19P1, PCLD, SEC63 |
| Pompe's Disease | Glycogen | Various - heart, | GAA |
| | storage disease | liver, spleen | |
| Porphyria (actually refers to a | Various- | | ALAD, ALAS2, CPOX, FECH, |
| group of different diseases all | wherever heme | | HMBS, PPOX, UROD, or UROS |
| having a specific heme | precursors | | |
| production process abnormality) | accumulate | | |
| posterior polymorphous corneal | eyes | | TCF4; COL8A2 |
| dystrophy | | | |
| Primary Hyperoxaluria (e.g. type | Various - eyes, | | LDHA (lactate dehydrogenase A) and |
| 1) | heart, kidneys, | | hydroxyacid oxidase 1 (HAO1) |
| | skeletal system | | |
| Primary Open Angle Glaucoma | eyes | | MYOC |
| (POAG) | | | |
| Primary sclerosing cholangitis | Liver, | | TCF4; COL8A2 |
| | gallbladder | | |
| Progeria (also called Hutchinson- | All | | LMNA |
| Gilford progeria syndrome) | | | |
| Prader-Willi Syndrome | Musculoskeletal | | Deletion of region of short arm of |
| | system, brain, | | chromosome 15, including UBE3A |
| | reproductive | | |
| | and endocrine | | |
| | system | | |
| Prostate Cancer | prostate | | HOXB13, MSMB, GPRC6A, TP53 |
| Pyruvate Dehydrogenase | Brain, nervous | | PDHA1 |
| Deficiency | system | | |
| Kidney/Renal carcinoma | kidney | | RLIP76, VEGF |
| Rett Syndrome | Brain | | MECP2, RTT, PPMX, MRX16, |
| | | | MRX79, CDKL5, STK9, MECP2, |
| | | | RTT, PPMX, MRX16, MRX79, x- |
| | | | Synuclein, DJ-1 |
| Retinitis pigmentosa (RP) | eye | | ADIPOR1, ABCA4, AGBL5, |
| | | | ARHGEF18, ARL2BP, ARL3, ARL6, |
| | | | BEST1, BBS1, BBS2, C2ORF71, |
| | | | C8ORF37, CA4, CERKL, CLRN1, |
| | | | CNGA1, CMGB1, CRB1, CRX, |
| | | | CYP4V2, DHDDS, DHX38, EMC1, |
| | | | EYS, FAM161A, FSCN2, GPR125, |
| | | | GUCA1B, HK1, HPRPF3, HGSNAT, |
| | | | IDH3B, IMPDH1, IMPG2, IFT140, |
| | | | IFT172, KLHL7, KIAA1549, KIZ, |
| | | | LRAT, MAK, MERTK, MVK, NEK2, |
| | | | NUROD1, NR2E3, NRL, OFD1, |
| | | | PDE6A, PDE6B, PDE6G, POMGNT1, |
| | | | PRCD, PROM1, PRPF3, PRPF4, |
| | | | PRPF6, PRPF8, PRPF31, PRPH2, |
| | | | RPB3, RDH12, REEP6, RP39, RGR, |
| | | | RHO, RLBP1, ROM1, RP1, RP1L1, |
| | | | RPY, RP2, RP9, RPE65, RPGR, |
| | | | SAMD11, SAG, SEMA4A, SLC7A14, |
| | | | SNRNP200, SPP2, SPATA7, TRNT1, |
| | | | TOPORS, TTC8, TULP1, USH2A, |
| | | | ZFN408, ZNF513, see also |
| | | | 20120204282 |
| Scheie syndrome (also known as | Various- liver, | | IDUA, α-L-iduronidase |
| mucopolysaccharidosis type I | spleen, eye, | | |
| S(MPS I-S)) | joint, heart, | | |
| | brain, skeletal | | |
| Schizophrenia | Brain | | Neuregulinl (Nrg1); Erb4 (receptor for |
| | | | Neuregulin); |
| | | | Complexin1 (Cplx1); Tph1 |
| | | | Tryptophan hydroxylase; Tph2 |
| | | | Tryptophan hydroxylase 2; Neurexin |
| | | | 1; GSK3; GSK3a; |
| | | | GSK3b; 5-HTT (Slc6a4); COMT; |
| | | | DRD (Drd1a); SLC6A3; DAOA; |
| | | | DTNBP1; Dao (Dao1); TCF4; |
| | | | COL8A2 |
| Secretase Related Disorders | Various | | APH-1 (alpha and beta); PSEN1; |
| | | | NCSTN; PEN-2; Nos1, Parp1, Nat1, |
| | | | Nat2, CTSB, APP, APHIB, PSEN2, |
| | | | PSENEN, BACE1, ITM2B, CTSD, |
| | | | NOTCH1, TNF, INS, DYT10, |
| | | | ADAM17, APOE, ACE, STN, TP53, |
| | | | IL6, NGFR, IL1B, ACHE, CTNNB1, |
| | | | IGF1, IFNG, NRG1, CASP3, MAPK1, |
| | | | CDH1, APBB1, HMGCR, CREB1, |
| | | | PTGS2, HES1, CAT, TGFB1, ENO2, |
| | | | ERBB4, TRAPPC10, MAOB, NGF, |
| | | | MMP12, JAG1, CD40LG, PPARG, |
| | | | FGF2, LRP1, NOTCH4, MAPK8, |
| | | | PREP, NOTCH3, PRNP, CTSG, EGF, |
| | | | REN, CD44, SELP, GHR, ADCYAP1, |
| | | | INSR, GFAP, MMP3, MAPK10, SP1, |
| | | | MYC, CTSE, PPARA, JUN, TIMP1, |
| | | | IL5, IL1A, MMP9, HTR4, HSPG2, |
| | | | KRAS, CYCS, SMG1, IL1R1, |
| | | | PROK1, MAPK3, NTRK1, IL13, |
| | | | MME, TKT, CXCR2, CHRM1, |
| | | | ATXN1, PAWR, NOTCJ2, M6PR, |
| | | | CYP46A1, CSNKID, MAPK14, |
| | | | PRG2, PRKCA, L1 CAM, CD40, |
| | | | NR1I2, JAG2, CTNND1, CMA1, |
| | | | SORT1, DLK1, THEM4, JUP, CD46, |
| | | | CCL11, CAV3, RNASE3, HSPA8, |
| | | | CASP9, CYP3A4, CCR3, TFAP2A, |
| | | | SCP2, CDK4, JOF1A, TCF7L2, |
| | | | B3GALTL, MDM2, RELA, CASP7, |
| | | | IDE, FANP4, CASK, ADCYAP1R1, |
| | | | ATF4, PDGFA, C21ORF33, SCG5, |
| | | | RMF123, NKFB1, ERBB2, CAV1, |
| | | | MMP7, TGFA, RXRA, STX1A, |
| | | | PSMC4, P2RY2, TNFRSF21, DLG1, |
| | | | NUMBL, SPN, PLSCR1, UBQLN2, |
| | | | UBQLN1, PCSK7, SPON1, SILV, |
| | | | QPCT, HESS, GCC1 |
| Selective IgA Deficiency | Immune system | | Type 1: MSH5; Type 2: TNFRSF13B |
| Severe Combined | Immune system | | JAK3, JAKL, DCLRE1C, ARTEMIS, |
| Immunodeficiency (SCID) and | | | SCIDA, RAG1, RAG2, ADA, PTPRC, |
| SCID-X1, and ADA-SCID | | | CD45, LCA, IL7R, CD3D, T3D, |
| | | | IL2RG, SCIDX1, SCIDX, IMD4, |
| | | | those identified in US Pat. App. Pub. |
| | | | 20110225664, 20110091441, |
| | | | 20100229252, 20090271881 and |
| | | | 20090222937; |
| Sickle cell disease | blood | | HBB, BCL11A, BCL11Ae, cis- |
| | | | regulatory elements of the B-globin |
| | | | locus, HBG 1/2 promoter, those |
| | | | described in WO2015148863, WO |
| | | | 2013/126794, US Pat. Pub. |
| | | | 20110182867 |
| Sly Syndrome (aka MPS VII) | | | GUSB |
| Spinocerebellar Ataxias (SCA | | | ATXN1, ATXN2, ATX3 |
| types 1, 2, 3, 6, 7, 8, 12 and 17) | | | |
| Sorsby Fundus Dystrophy | eye | | TIMP3 |
| Stargardt disease | eye | | ABCR, ELOVL4, ABCA4, PROM1 |
| Tay-Sachs Disease | Lysosomal | Various - CNS, | HEX-A |
| | Storage disease | brain, eye | |
| Thalassemia (Alpha, Beta, Delta) | blood | | HBA1, HBA2 (Alpha), HBB (Beta), |
| | | | HBB and HBD (delta), LCRB, |
| | | | BCL11A, BCL11Ae, cis-regulatory |
| | | | elements of the B-globin locus, HBG |
| | | | 1/2 promoter, those described in |
| | | | WO2015148860, US Pat. Pub. |
| | | | 20110182867, 2015/148860 |
| Thymic Aplasia (DiGeorge | Immune system, | | deletion of 30 to 40 genes in the |
| Syndrome; 22q11.2 deletion | thymus | | middle of chromosome 22 at |
| syndrome) | | | a location known as 22q11.2, including |
| | | | TBX1, DGCR8 |
| Transthyretin amyloidosis | liver | | TTR (transthyretin) |
| (ATTR) | | | |
| trimethylaminuria | Metabolism | | FMO3 |
| | disease | | |
| Trinucleotide Repeat Disorders | Various | | HTT; SBMA/SMAX1/AR; |
| (generally) | | | FXN/X25 ATX3; |
| | | | ATXN1; ATXN2; |
| | | | DMPK; Atrophin-1 and Atn1 |
| | | | (DRPLA Dx); CBP (Creb-BP - global |
| | | | instability); VLDLR; Atxn7; Atxn10; |
| | | | FEN1, TNRC6A, PABPN1, JPH3, |
| | | | MED15, ATXN1, ATXN3, TBP, |
| | | | CACNA1A, ATXN80S, PPP2R2B, |
| | | | ATXN7, TNRC6B, TNRC6C, CELF3, |
| | | | MAB21L1, MSH2, TMEM185A, |
| | | | SIX5, CNPY3, RAXE, GNB2, RPL14, |
| | | | ATXN8, ISR, TTR, EP400, GIGYF2, |
| | | | OGG1, STC1, CNDP1, C10ORF2, |
| | | | MAML3, DKC1, PAXIP1, CASK, |
| | | | MAPT, SP1, POLG, AFF2, THBS1, |
| | | | TP53, ESR1, CGGBP1, ABT1, KLK3, |
| | | | PRNP, JUN, KCNN3, BAX, FRAXA, |
| | | | KBTBD10, MBNL1, RAD51, |
| | | | NCOA3, ERDA1, TSC1, COMP, |
| | | | GGLC, RRAD, MSH3, DRD2, CD44, |
| | | | CTCF, CCND1, CLSPN, MEF2A, |
| | | | PTPRU, GAPDH, TRIM22, WT1, |
| | | | AHR, GPX1, TPMT, NDP, ARX, |
| | | | TYR, EGR1, UNG, NUMBL, FABP2, |
| | | | EN2, CRYGC, SRP14, CRYGB, |
| | | | PDCD1, HOXA1, ATXN2L, PMS2, |
| | | | GLA, CBL, FTH1, IL12RB2, OTX2, |
| | | | HOXA5, POLG2, DLX2, AHRR, |
| | | | MANF, RMEM158, see also |
| | | | 20110016540 |
| Turner's Syndrome (XO) | Various - | | Monosomy X |
| | reproductive | | |
| | organs, and sex | | |
| | characteristics, | | |
| | vasculature | | |
| Tuberous Sclerosis | CNS, heart, | | TSC1, TSC2 |
| | kidneys | | |
| Usher syndrome (Types I, II, and | Ears, eyes | | ABHD12, CDH23, CIB2, CLRN1, |
| III) | | | DFNB31, GPR98, HARS, MYO7A, |
| | | | PCDH15, USH1C, USH1G, USH2A, |
| | | | USH11A, those described in |
| | | | WO2015134812A1 |
| Velocardiofacial syndrome (aka | Various - | | Many genes are deleted, COM, TBX1, |
| 22q11.2 deletion syndrome, | skeletal, heart, | | and other are associated with |
| DiGeorge syndrome, conotruncal | kidney, immune | | symptoms |
| anomaly face syndrome (CTAF), | system, brain | | |
| autosomal dominant Opitz G/BB | | | |
| syndrome or Cayler cardiofacial | | | |
| syndrome) | | | |
| Von Gierke's Disease (Glycogen | Glycogen | Various - liver, | G6PC and SLC37A4 |
| Storage Disease type I) | Storage disease | kidney | |
| Von Hippel-Lindau Syndrome | Various - cell | CNS, Kidney, | VHL |
| | growth | Eye, visceral | |
| | regulation | organs | |
| | disorder | | |
| Von Willebrand Disease (Types | blood | | VWF |
| I, II and III) | | | |
| Wilson Disease | Various - | Liver, brains, | ATP7B |
| | Copper Storage | eyes, other | |
| | Disease | tissues where | |
| | | copper builds up | |
| Wiskott-Aldrich Syndrome | Immune System | | WAS |
| Xeroderma Pigmentosum | Skin | Nervous system | POLH |
| XXX Syndrome | Endocrine, brain | | X chromosome trisomy |

[0594] In an embodiment, the compositions, systems, or components thereof can be used treat or prevent a disease in a subject by modifying one or more genes associated with one or more cellular functions, such as any one or more of those in Table 5. In an embodiment, the disease is a genetic disease or disorder. In some of embodiments, the composition, system, or component thereof can modify one or more genes or polynucleotides associated with one or more genetic diseases such as any set forth in Table 5.

TABLE 5
Exemplary Genes controlling Cellular Functions

| CELLULAR FUNCTION | GENES |
|---|---|
| PI3K/AKT Signaling | PRKCE; ITGAM; ITGA5; IRAK1; PRKAA2; EIF2AK2; |
| | PTEN; EIF4E; PRKCZ; GRK6; MAPK1; TSC1; PLK1; |
| | AKT2; IKBKB; PIK3CA; CDK8; CDKN1B; NFKB2; BCL2; |
| | PIK3CB; PPP2R1A; MAPK8; BCL2L1; MAPK3; TSC2; |
| | ITGA1; KRAS; EIF4EBP1; RELA; PRKCD; NOS3; |
| | PRKAA1; MAPK9; CDK2; PPP2CA; PIM1; ITGB7; |
| | YWHAZ; ILK; TP53; RAF1; IKBKG; RELB; DYRK1A; |
| | CDKN1A; ITGB1; MAP2K2; JAK1; AKT1; JAK2; PIK3R1; |
| | CHUK; PDPK1; PPP2R5C; CTNNB1; MAP2K1; NFKB1; |
| | PAK3; ITGB3; CCND1; GSK3A; FRAP1; SFN; ITGA2; |
| | TTK; CSNK1A1; BRAF; GSK3B; AKT3; FOXO1; SGK; |
| | HSP90AA1; RPS6KB1 |
| ERK/MAPK Signaling | PRKCE; ITGAM; ITGA5; HSPB1; IRAK1; PRKAA2; |
| | EIF2AK2; RAC1; RAP1A; TLN1; EIF4E; ELK1; GRK6; |
| | MAPK1; RAC2; PLK1; AKT2; PIK3CA; CDK8; CREB1; |
| | PRKCI; PTK2; FOS; RPS6KA4; PIK3CB; PPP2R1A; |
| | PIK3C3; MAPK8; MAPK3; ITGA1; ETS1; KRAS; MYCN; |
| | EIF4EBP1; PPARG; PRKCD; PRKAA1; MAPK9; SRC; |
| | CDK2; PPP2CA; PIM1; PIK3C2A; ITGB7; YWHAZ; |
| | PPP1CC; KSR1; PXN; RAF1; FYN; DYRK1A; ITGB1; |
| | MAP2K2; PAK4; PIK3R1; STAT3; PPP2R5C; MAP2K1; |
| | PAK3; ITGB3; ESR1; ITGA2; MYC; TTK; CSNK1A1; |
| | CRKL; BRAF; ATF4; PRKCA; SRF; STAT1; SGK |
| Glucocorticoid Receptor | RAC1; TAF4B; EP300; SMAD2; TRAF6; PCAF; ELK1; |
| Signaling | MAPK1; SMAD3; AKT2; IKBKB; NCOR2; UBE2I; |
| | PIK3CA; CREB1; FOS; HSPA5; NFKB2; BCL2; |
| | MAP3K14; STAT5B; PIK3CB; PIK3C3; MAPK8; BCL2L1; |
| | MAPK3; TSC22D3; MAPK10; NRIP1; KRAS; MAPK13; |
| | RELA; STAT5A; MAPK9; NOS2A; PBX1; NR3C1; |
| | PIK3C2A; CDKN1C; TRAF2; SERPINE1; NCOA3; |
| | MAPK14; TNF; RAF1; IKBKG; MAP3K7; CREBBP; |
| | CDKN1A; MAP2K2; JAK1; IL8; NCOA2; AKT1; JAK2; |
| | PIK3R1; CHUK; STAT3; MAP2K1; NFKB1; TGFBR1; |
| | ESR1; SMAD4; CEBPB; JUN; AR; AKT3; CCL2; MMP1; |
| | STAT1; IL6; HSP90AA1 |
| Axonal Guidance Signaling | PRKCE; ITGAM; ROCK1; ITGA5; CXCR4; ADAM12; |
| | IGF1; RAC1; RAP1A; EIF4E; PRKCZ; NRP1; NTRK2; |
| | ARHGEF7; SMO; ROCK2; MAPK1; PGF; RAC2; |
| | PTPN11; GNAS; AKT2; PIK3CA; ERBB2; PRKCI; PTK2; |
| | CFL1; GNAQ; PIK3CB; CXCL12; PIK3C3; WNT11; |
| | PRKD1; GNB2L1; ABL1; MAPK3; ITGA1; KRAS; RHOA; |
| | PRKCD; PIK3C2A; ITGB7; GLI2; PXN; VASP; RAF1; |
| | FYN; ITGB1; MAP2K2; PAK4; ADAM17; AKT1; PIK3R1; |
| | GLI1; WNT5A; ADAM10; MAP2K1; PAK3; ITGB3; |
| | CDC42; VEGFA; ITGA2; EPHA8; CRKL; RND1; GSK3B; |
| | AKT3; PRKCA |
| Ephrin Receptor Signaling | PRKCE; ITGAM; ROCK1; ITGA5; CXCR4; IRAK1; |
| Actin Cytoskeleton | PRKAA2; EIF2AK2; RAC1; RAP1A; GRK6; ROCK2; |
| Signaling | MAPK1; PGF; RAC2; PTPN11; GNAS; PLK1; AKT2; |
| | DOK1; CDK8; CREB1; PTK2; CFL1; GNAQ; MAP3K14; |
| | CXCL12; MAPK8; GNB2L1; ABL1; MAPK3; ITGA1; |
| | KRAS; RHOA; PRKCD; PRKAA1; MAPK9; SRC; CDK2; |
| | PIM1; ITGB7; PXN; RAF1; FYN; DYRKIA; ITGB1; |
| | MAP2K2; PAK4; AKT1; JAK2; STAT3; ADAM10; |
| | MAP2K1; PAK3; ITGB3; CDC42; VEGFA; ITGA2; |
| | EPHA8; TTK; CSNK1A1; CRKL; BRAF; PTPN13; ATF4; |
| | AKT3; SGK |
| | ACTN4; PRKCE; ITGAM; ROCK1; ITGA5; IRAK1; |
| | PRKAA2; EIF2AK2; RAC1; INS; ARHGEF7; GRK6; |
| | ROCK2; MAPK1; RAC2; PLK1; AKT2; PIK3CA; CDK8; |
| | PTK2; CFL1; PIK3CB; MYH9; DIAPH1; PIK3C3; MAPK8; |
| | F2R; MAPK3; SLC9A1; ITGA1; KRAS; RHOA; PRKCD; |
| | PRKAA1; MAPK9; CDK2; PIM1; PIK3C2A; ITGB7; |
| | PPP1CC; PXN; VIL2; RAF1; GSN; DYRK1A; ITGB1; |
| | MAP2K2; PAK4; PIP5K1A; PIK3R1; MAP2K1; PAK3; |
| | ITGB3; CDC42; APC; ITGA2; TTK; CSNK1A1; CRKL; |
| | BRAF; VAV3; SGK |
| Huntington's Disease | PRKCE; IGF1; EP300; RCOR1; PRKCZ; HDAC4; TGM2; |
| Signaling | MAPK1; CAPNS1; AKT2; EGFR; NCOR2; SP1; CAPN2; |
| | PIK3CA; HDAC5; CREB1; PRKCI; HSPA5; REST; |
| | GNAQ; PIK3CB; PIK3C3; MAPK8; IGF1R; PRKD1; |
| | GNB2L1; BCL2L1; CAPN1; MAPK3; CASP8; HDAC2; |
| | HDAC7A; PRKCD; HDAC11; MAPK9; HDAC9; PIK3C2A; |
| | HDAC3; TP53; CASP9; CREBBP; AKT1; PIK3R1; |
| | PDPK1; CASP1; APAF1; FRAP1; CASP2; JUN; BAX; |
| | ATF4; AKT3; PRKCA; CLTC; SGK; HDAC6; CASP3 |
| Apoptosis Signaling | PRKCE; ROCK1; BID; IRAK1; PRKAA2; EIF2AK2; BAK1; |
| | BIRC4; GRK6; MAPK1; CAPNS1; PLK1; AKT2; IKBKB; |
| | CAPN2; CDK8; FAS; NFKB2; BCL2; MAP3K14; MAPK8; |
| | BCL2L1; CAPN1; MAPK3; CASP8; KRAS; RELA; |
| | PRKCD; PRKAA1; MAPK9; CDK2; PIM1; TP53; TNF; |
| | RAF1; IKBKG; RELB; CASP9; DYRK1A; MAP2K2; |
| | CHUK; APAF1; MAP2K1; NFKB1; PAK3; LMNA; CASP2; |
| | BIRC2; TTK; CSNK1A1; BRAF; BAX; PRKCA; SGK; |
| | CASP3; BIRC3; PARP1 |
| B Cell Receptor Signaling | RAC1; PTEN; LYN; ELK1; MAPK1; RAC2; PTPN11; |
| | AKT2; IKBKB; PIK3CA; CREB1; SYK; NFKB2; CAMK2A; |
| | MAP3K14; PIK3CB; PIK3C3; MAPK8; BCL2L1; ABL1; |
| | MAPK3; ETS1; KRAS; MAPK13; RELA; PTPN6; MAPK9; |
| | EGR1; PIK3C2A; BTK; MAPK14; RAF1; IKBKG; RELB; |
| | MAP3K7; MAP2K2; AKT1; PIK3R1; CHUK; MAP2K1; |
| | NFKB1; CDC42; GSK3A; FRAP1; BCL6; BCL10; JUN; |
| | GSK3B; ATF4; AKT3; VAV3; RPS6KB1 |
| Leukocyte Extravasation | ACTN4; CD44; PRKCE; ITGAM; ROCK1; CXCR4; CYBA; |
| Signaling | RAC1; RAP1A; PRKCZ; ROCK2; RAC2; PTPN11; |
| | MMP14; PIK3CA; PRKCI; PTK2; PIK3CB; CXCL12; |
| | PIK3C3; MAPK8; PRKD1; ABL1; MAPK10; CYBB; |
| | MAPK13; RHOA; PRKCD; MAPK9; SRC; PIK3C2A; BTK; |
| | MAPK14; NOX1; PXN; VIL2; VASP; ITGB1; MAP2K2; |
| | CTNND1; PIK3R1; CTNNB1; CLDN1; CDC42; F11R; ITK; |
| | CRKL; VAV3; CTTN; PRKCA; MMP1; MMP9 |
| Integrin Signaling | ACTN4; ITGAM; ROCK1; ITGA5; RAC1; PTEN; RAP1A; |
| | TLN1; ARHGEF7; MAPK1; RAC2; CAPNS1; AKT2; |
| | CAPN2; PIK3CA; PTK2; PIK3CB; PIK3C3; MAPK8; |
| | CAV1; CAPN1; ABL1; MAPK3; ITGA1; KRAS; RHOA; |
| | SRC; PIK3C2A; ITGB7; PPP1CC; ILK; PXN; VASP; |
| | RAF1; FYN; ITGB1; MAP2K2; PAK4; AKT1; PIK3R1; |
| | TNK2; MAP2K1; PAK3; ITGB3; CDC42; RND3; ITGA2; |
| | CRKL; BRAF; GSK3B; AKT3 |
| Acute Phase Response | IRAK1; SOD2; MYD88; TRAF6; ELK1; MAPK1; PTPN11; |
| Signaling | AKT2; IKBKB; PIK3CA; FOS; NFKB2; MAP3K14; |
| | PIK3CB; MAPK8; RIPK1; MAPK3; IL6ST; KRAS; |
| | MAPK13; IL6R; RELA; SOCS1; MAPK9; FTL; NR3C1; |
| | TRAF2; SERPINE1; MAPK14; TNF; RAF1; PDK1; |
| | IKBKG; RELB; MAP3K7; MAP2K2; AKT1; JAK2; PIK3R1; |
| | CHUK; STAT3; MAP2K1; NFKB1; FRAP1; CEBPB; JUN; |
| | AKT3; IL1R1; IL6 |
| PTEN Signaling | ITGAM; ITGA5; RAC1; PTEN; PRKCZ; BCL2L11; |
| | MAPK1; RAC2; AKT2; EGFR; IKBKB; CBL; PIK3CA; |
| | CDKN1B; PTK2; NFKB2; BCL2; PIK3CB; BCL2L1; |
| | MAPK3; ITGA1; KRAS; ITGB7; ILK; PDGFRB; INSR; |
| | RAF1; IKBKG; CASP9; CDKN1A; ITGB1; MAP2K2; |
| | AKT1; PIK3R1; CHUK; PDGFRA; PDPK1; MAP2K1; |
| | NFKB1; ITGB3; CDC42; CCND1; GSK3A; ITGA2; |
| | GSK3B; AKT3; FOXO1; CASP3; RPS6KB1 |
| p53 Signaling | PTEN; EP300; BBC3; PCAF; FASN; BRCA1; GADD45A; |
| Aryl Hydrocarbon Receptor | BIRC5; AKT2; PIK3CA; CHEK1; TP53INP1; BCL2; |
| Signaling | PIK3CB; PIK3C3; MAPK8; THBS1; ATR; BCL2L1; E2F1; |
| | PMAIP1; CHEK2; TNFRSF10B; TP73; RB1; HDAC9; |
| | CDK2; PIK3C2A; MAPK14; TP53; LRDD; CDKN1A; |
| | HIPK2; AKT1; PIK3R1; RRM2B; APAF1; CTNNB1; |
| | SIRT1; CCND1; PRKDC; ATM; SFN; CDKN2A; JUN; |
| | SNAI2; GSK3B; BAX; AKT3 |
| | HSPB1; EP300; FASN; TGM2; RXRA; MAPK1; NQO1; |
| | NCOR2; SP1; ARNT; CDKN1B; FOS; CHEK1; |
| | SMARCA4; NFKB2; MAPK8; ALDH1A1; ATR; E2F1; |
| | MAPK3; NRIP1; CHEK2; RELA; TP73; GSTP1; RB1; |
| | SRC; CDK2; AHR; NFE2L2; NCOA3; TP53; TNF; |
| | CDKN1A; NCOA2; APAF1; NFKB1; CCND1; ATM; ESR1; |
| | CDKN2A; MYC; JUN; ESR2; BAX; IL6; CYP1B1; |
| | HSP90AA1 |
| Xenobiotic Metabolism | PRKCE; EP300; PRKCZ; RXRA; MAPK1; NQO1; |
| Signaling | NCOR2; PIK3CA; ARNT; PRKCI; NFKB2; CAMK2A; |
| | PIK3CB; PPP2R1A; PIK3C3; MAPK8; PRKD1; |
| | ALDH1A1; MAPK3; NRIP1; KRAS; MAPK13; PRKCD; |
| | GSTP1; MAPK9; NOS2A; ABCB1; AHR; PPP2CA; FTL; |
| | NFE2L2; PIK3C2A; PPARGC1A; MAPK14; TNF; RAF1; |
| | CREBBP; MAP2K2; PIK3R1; PPP2R5C; MAP2K1; |
| | NFKB1; KEAP1; PRKCA; EIF2AK3; IL6; CYP1B1; |
| | HSP90AA1 |
| SAPK/JNK Signaling | PRKCE; IRAK1; PRKAA2; EIF2AK2; RAC1; ELK1; |
| | GRK6; MAPK1; GADD45A; RAC2; PLK1; AKT2; PIK3CA; |
| | FADD; CDK8; PIK3CB; PIK3C3; MAPK8; RIPK1; |
| | GNB2L1; IRS1; MAPK3; MAPK10; DAXX; KRAS; |
| | PRKCD; PRKAA1; MAPK9; CDK2; PIM1; PIK3C2A; |
| | TRAF2; TP53; LCK; MAP3K7; DYRK1A; MAP2K2; |
| | PIK3R1; MAP2K1; PAK3; CDC42; JUN; TTK; CSNK1A1; |
| | CRKL; BRAF; SGK |
| PPAr/RXR Signaling | PRKAA2; EP300; INS; SMAD2; TRAF6; PPARA; FASN; |
| | RXRA; MAPK1; SMAD3; GNAS; IKBKB; NCOR2; |
| | ABCA1; GNAQ; NFKB2; MAP3K14; STAT5B; MAPK8; |
| | IRS1; MAPK3; KRAS; RELA; PRKAA1; PPARGC1A; |
| | NCOA3; MAPK14; INSR; RAF1; IKBKG; RELB; MAP3K7; |
| | CREBBP; MAP2K2; JAK2; CHUK; MAP2K1; NFKB1; |
| | TGFBR1; SMAD4; JUN; IL1R1; PRKCA; IL6; HSP90AA1; |
| | ADIPOQ |
| NF-KB Signaling | IRAK1; EIF2AK2; EP300; INS; MYD88; PRKCZ; TRAF6; |
| | TBK1; AKT2; EGFR; IKBKB; PIK3CA; BTRC; NFKB2; |
| | MAP3K14; PIK3CB; PIK3C3; MAPK8; RIPK1; HDAC2; |
| | KRAS; RELA; PIK3C2A; TRAF2; TLR4; PDGFRB; TNF; |
| | INSR; LCK; IKBKG; RELB; MAP3K7; CREBBP; AKT1; |
| | PIK3R1; CHUK; PDGFRA; NFKB1; TLR2; BCL10; |
| | GSK3B; AKT3; TNFAIP3; IL1R1 |
| Neuregulin Signaling | ERBB4; PRKCE; ITGAM; ITGA5; PTEN; PRKCZ; ELK1; |
| Wnt & Beta catenin | MAPK1; PTPN11; AKT2; EGFR; ERBB2; PRKCI; |
| Signaling | CDKN1B; STAT5B; PRKD1; MAPK3; ITGA1; KRAS; |
| | PRKCD; STAT5A; SRC; ITGB7; RAF1; ITGB1; MAP2K2; |
| | ADAM17; AKT1; PIK3R1; PDPK1; MAP2K1; ITGB3; |
| | EREG; FRAP1; PSEN1; ITGA2; MYC; NRG1; CRKL; |
| | AKT3; PRKCA; HSP90AA1; RPS6KB1 |
| | CD44; EP300; LRP6; DVL3; CSNK1E; GJA1; SMO; |
| | AKT2; PIN1; CDH1; BTRC; GNAQ; MARK2; PPP2R1A; |
| | WNT11; SRC; DKK1; PPP2CA; SOX6; SFRP2; ILK; |
| | LEF1; SOX9; TP53; MAP3K7; CREBBP; TCF7L2; AKT1; |
| | PPP2R5C; WNT5A; LRP5; CTNNB1; TGFBR1; CCND1; |
| | GSK3A; DVL1; APC; CDKN2A; MYC; CSNK1A1; GSK3B; |
| | AKT3; SOX2 |
| Insulin Receptor Signaling | PTEN; INS; EIF4E; PTPN1; PRKCZ; MAPK1; TSC1; |
| | PTPN11; AKT2; CBL; PIK3CA; PRKCI; PIK3CB; PIK3C3; |
| | MAPK8; IRS1; MAPK3; TSC2; KRAS; EIF4EBP1; |
| | SLC2A4; PIK3C2A; PPP1CC; INSR; RAF1; FYN; |
| | MAP2K2; JAK1; AKT1; JAK2; PIK3R1; PDPK1; MAP2K1; |
| | GSK3A; FRAP1; CRKL; GSK3B; AKT3; FOXO1; SGK; |
| | RPS6KB1 |
| IL-6 Signaling | HSPB1; TRAF6; MAPKAPK2; ELK1; MAPK1; PTPN11; |
| | IKBKB; FOS; NFKB2; MAP3K14; MAPK8; MAPK3; |
| | MAPK10; IL6ST; KRAS; MAPK13; IL6R; RELA; SOCS1; |
| | MAPK9; ABCB1; TRAF2; MAPK14; TNF; RAF1; IKBKG; |
| | RELB; MAP3K7; MAP2K2; IL8; JAK2; CHUK; STAT3; |
| | MAP2K1; NFKB1; CEBPB; JUN; IL1R1; SRF; IL6 |
| Hepatic Cholestasis | PRKCE; IRAK1; INS; MYD88; PRKCZ; TRAF6; PPARA; |
| | RXRA; IKBKB; PRKCI; NFKB2; MAP3K14; MAPK8; |
| | PRKD1; MAPK10; RELA; PRKCD; MAPK9; ABCB1; |
| | TRAF2; TLR4; TNF; INSR; IKBKG; RELB; MAP3K7; IL8; |
| | CHUK; NR1H2; TJP2; NFKB1; ESR1; SREBF1; FGFR4; |
| | JUN; IL1R1; PRKCA; IL6 |
| IGF-1 Signaling | IGF1; PRKCZ; ELK1; MAPK1; PTPN11; NEDD4; AKT2; |
| | PIK3CA; PRKCI; PTK2; FOS; PIK3CB; PIK3C3; MAPK8; |
| | IGF1R; IRS1; MAPK3; IGFBP7; KRAS; PIK3C2A; |
| | YWHAZ; PXN; RAF1; CASP9; MAP2K2; AKT1; PIK3R1; |
| | PDPK1; MAP2K1; IGFBP2; SFN; JUN; CYR61; AKT3; |
| | FOXO1; SRF; CTGF; RPS6KB1 |
| NRF2-mediated Oxidative | PRKCE; EP300; SOD2; PRKCZ; MAPK1; SQSTM1; |
| Stress Response | NQO1; PIK3CA; PRKCI; FOS; PIK3CB; PIK3C3; MAPK8; |
| | PRKD1; MAPK3; KRAS; PRKCD; GSTP1; MAPK9; FTL; |
| | NFE2L2; PIK3C2A; MAPK14; RAF1; MAP3K7; CREBBP; |
| | MAP2K2; AKT1; PIK3R1; MAP2K1; PPIB; JUN; KEAP1; |
| | GSK3B; ATF4; PRKCA; EIF2AK3; HSP90AA1 |
| Hepatic Fibrosis/Hepatic | EDN1; IGF1; KDR; FLT1; SMAD2; FGFR1; MET; PGF; |
| Stellate Cell Activation | SMAD3; EGFR; FAS; CSF1; NFKB2; BCL2; MYH9; |
| | IGF1R; IL6R; RELA; TLR4; PDGFRB; TNF; RELB; IL8; |
| | PDGFRA; NFKB1; TGFBR1; SMAD4; VEGFA; BAX; |
| | IL1R1; CCL2; HGF; MMP1; STAT1; IL6; CTGF; MMP9 |
| PPAR Signaling | EP300; INS; TRAF6; PPARA; RXRA; MAPK1; IKBKB; |
| | NCOR2; FOS; NFKB2; MAP3K14; STAT5B; MAPK3; |
| | NRIP1; KRAS; PPARG; RELA; STAT5A; TRAF2; |
| | PPARGC1A; PDGFRB; TNF; INSR; RAF1; IKBKG; |
| | RELB; MAP3K7; CREBBP; MAP2K2; CHUK; PDGFRA; |
| | MAP2K1; NFKB1; JUN; IL1R1; HSP90AA1 |
| Fc Epsilon RI Signaling | PRKCE; RAC1; PRKCZ; LYN; MAPK1; RAC2; PTPN11; |
| | AKT2; PIK3CA; SYK; PRKCI; PIK3CB; PIK3C3; MAPK8; |
| | PRKD1; MAPK3; MAPK10; KRAS; MAPK13; PRKCD; |
| | MAPK9; PIK3C2A; BTK; MAPK14; TNF; RAF1; FYN; |
| | MAP2K2; AKT1; PIK3R1; PDPK1; MAP2K1; AKT3; |
| | VAV3; PRKCA |
| G-Protein Coupled | PRKCE; RAP1A; RGS16; MAPK1; GNAS; AKT2; IKBKB; |
| Receptor Signaling | PIK3CA; CREB1; GNAQ; NFKB2; CAMK2A; PIK3CB; |
| | PIK3C3; MAPK3; KRAS; RELA; SRC; PIK3C2A; RAF1; |
| | IKBKG; RELB; FYN; MAP2K2; AKT1; PIK3R1; CHUK; |
| | PDPK1; STAT3; MAP2K1; NFKB1; BRAF; ATF4; AKT3; |
| | PRKCA |
| Inositol Phosphate | PRKCE; IRAK1; PRKAA2; EIF2AK2; PTEN; GRK6; |
| Metabolism | MAPK1; PLK1; AKT2; PIK3CA; CDK8; PIK3CB; PIK3C3; |
| | MAPK8; MAPK3; PRKCD; PRKAA1; MAPK9; CDK2; |
| | PIM1; PIK3C2A; DYRK1A; MAP2K2; PIP5K1A; PIK3R1; |
| | MAP2K1; PAK3; ATM; TTK; CSNK1A1; BRAF; SGK |
| PDGF Signaling | EIF2AK2; ELK1; ABL2; MAPK1; PIK3CA; FOS; PIK3CB; |
| | PIK3C3; MAPK8; CAV1; ABL1; MAPK3; KRAS; SRC; |
| | PIK3C2A; PDGFRB; RAF1; MAP2K2; JAK1; JAK2; |
| | PIK3R1; PDGFRA; STAT3; SPHK1; MAP2K1; MYC; |
| | JUN; CRKL; PRKCA; SRF; STAT1; SPHK2 |
| VEGF Signaling | ACTN4; ROCK1; KDR; FLT1; ROCK2; MAPK1; PGF; |
| | AKT2; PIK3CA; ARNT; PTK2; BCL2; PIK3CB; PIK3C3; |
| | BCL2L1; MAPK3; KRAS; HIF1A; NOS3; PIK3C2A; PXN; |
| | RAF1; MAP2K2; ELAVL1; AKT1; PIK3R1; MAP2K1; SFN; |
| | VEGFA; AKT3; FOXO1; PRKCA |
| Natural Killer Cell | PRKCE; RAC1; PRKCZ; MAPK1; RAC2; PTPN11; |
| Signaling | KIR2DL3; AKT2; PIK3CA; SYK; PRKCI; PIK3CB; |
| | PIK3C3; PRKD1; MAPK3; KRAS; PRKCD; PTPN6; |
| | PIK3C2A; LCK; RAF1; FYN; MAP2K2; PAK4; AKT1; |
| | PIK3R1; MAP2K1; PAK3; AKT3; VAV3; PRKCA |
| Cell Cycle: G1/S | HDAC4; SMAD3; SUV39H1; HDAC5; CDKN1B; BTRC; |
| Checkpoint Regulation | ATR; ABL1; E2F1; HDAC2; HDAC7A; RB1; HDAC11; |
| | HDAC9; CDK2; E2F2; HDAC3; TP53; CDKN1A; CCND1; |
| | E2F4; ATM; RBL2; SMAD4; CDKN2A; MYC; NRG1; |
| | GSK3B; RBL1; HDAC6 |
| T Cell Receptor | RAC1; ELK1; MAPK1; IKBKB; CBL; PIK3CA; FOS; |
| Signaling | NFKB2; PIK3CB; PIK3C3; MAPK8; MAPK3; KRAS; |
| | RELA; PIK3C2A; BTK; LCK; RAF1; IKBKG; RELB; FYN; |
| | MAP2K2; PIK3R1; CHUK; MAP2K1; NFKB1; ITK; BCL10; |
| | JUN; VAV3 |
| Death Receptor | CRADD; HSPB1; BID; BIRC4; TBK1; IKBKB; FADD; |
| Signaling | FAS; NFKB2; BCL2; MAP3K14; MAPK8; RIPK1; CASP8; |
| | DAXX; TNFRSF10B; RELA; TRAF2; TNF; IKBKG; RELB; |
| | CASP9; CHUK; APAF1; NFKB1; CASP2; BIRC2; CASP3; |
| | BIRC3 |
| FGF Signaling | RAC1; FGFR1; MET; MAPKAPK2; MAPK1; PTPN11; |
| | AKT2; PIK3CA; CREB1; PIK3CB; PIK3C3; MAPK8; |
| | MAPK3; MAPK13; PTPN6; PIK3C2A; MAPK14; RAF1; |
| | AKT1; PIK3R1; STAT3; MAP2K1; FGFR4; CRKL; ATF4; |
| | AKT3; PRKCA; HGF |
| GM-CSF Signaling | LYN; ELK1; MAPK1; PTPN11; AKT2; PIK3CA; CAMK2A; |
| | STAT5B; PIK3CB; PIK3C3; GNB2L1; BCL2L1; MAPK3; |
| | ETS1; KRAS; RUNX1; PIM1; PIK3C2A; RAF1; MAP2K2; |
| | AKT1; JAK2; PIK3R1; STAT3; MAP2K1; CCND1; AKT3; |
| | STAT1 |
| Amyotrophic Lateral | BID; IGF1; RAC1; BIRC4; PGF; CAPNS1; CAPN2; |
| Sclerosis Signaling | PIK3CA; BCL2; PIK3CB; PIK3C3; BCL2L1; CAPN1; |
| | PIK3C2A; TP53; CASP9; PIK3R1; RAB5A; CASP1; |
| | APAF1; VEGFA; BIRC2; BAX; AKT3; CASP3; BIRC3 |
| JAK/Stat Signaling | PTPN1; MAPK1; PTPN11; AKT2; PIK3CA; STAT5B; |
| | PIK3CB; PIK3C3; MAPK3; KRAS; SOCS1; STAT5A; |
| | PTPN6; PIK3C2A; RAF1; CDKN1A; MAP2K2; JAK1; |
| | AKT1; JAK2; PIK3R1; STAT3; MAP2K1; FRAP1; AKT3; |
| | STAT1 |
| Nicotinate and | PRKCE; IRAK1; PRKAA2; EIF2AK2; GRK6; MAPK1; |
| Nicotinamide | PLK1; AKT2; CDK8; MAPK8; MAPK3; PRKCD; PRKAA1; |
| Metabolism | PBEF1; MAPK9; CDK2; PIM1; DYRK1A; MAP2K2; |
| | MAP2K1; PAK3; NT5E; TTK; CSNK1A1; BRAF; SGK |
| Chemokine Signaling | CXCR4; ROCK2; MAPK1; PTK2; FOS; CFL1; GNAQ; |
| | CAMK2A; CXCL12; MAPK8; MAPK3; KRAS; MAPK13; |
| | RHOA; CCR3; SRC; PPP1CC; MAPK14; NOX1; RAF1; |
| | MAP2K2; MAP2K1; JUN; CCL2; PRKCA |
| IL-2 Signaling | ELK1; MAPK1; PTPN11; AKT2; PIK3CA; SYK; FOS; |
| | STAT5B; PIK3CB; PIK3C3; MAPK8; MAPK3; KRAS; |
| | SOCS1; STAT5A; PIK3C2A; LCK; RAF1; MAP2K2; |
| | JAK1; AKT1; PIK3R1; MAP2K1; JUN; AKT3 |
| Synaptic Long Term | PRKCE; IGF1; PRKCZ; PRDX6; LYN; MAPK1; GNAS; |
| Depression | PRKCI; GNAQ; PPP2R1A; IGF1R; PRKD1; MAPK3; |
| | KRAS; GRN; PRKCD; NOS3; NOS2A; PPP2CA; |
| | YWHAZ; RAF1; MAP2K2; PPP2R5C; MAP2K1; PRKCA |
| Estrogen Receptor | TAF4B; EP300; CARM1; PCAF; MAPK1; NCOR2; |
| Signaling | SMARCA4; MAPK3; NRIP1; KRAS; SRC; NR3C1; |
| | HDAC3; PPARGC1A; RBM9; NCOA3; RAF1; CREBBP; |
| | MAP2K2; NCOA2; MAP2K1; PRKDC; ESR1; ESR2 |
| Protein Ubiquitination | TRAF6; SMURF1; BIRC4; BRCA1; UCHL1; NEDD4; |
| Pathway | CBL; UBE2I; BTRC; HSPA5; USP7; USP10; FBXW7; |
| | USP9X; STUB1; USP22; B2M; BIRC2; PARK2; USP8; |
| | USP1; VHL; HSP90AA1; BIRC3 |
| IL-10 Signaling | TRAF6; CCR1; ELK1; IKBKB; SP1; FOS; NFKB2; |
| | MAP3K14; MAPK8; MAPK13; RELA; MAPK14; TNF; |
| | IKBKG; RELB; MAP3K7; JAK1; CHUK; STAT3; NFKB1; |
| | JUN; IL1R1; IL6 |
| VDR/RXR Activation | PRKCE; EP300; PRKCZ; RXRA; GADD45A; HES1; |
| | NCOR2; SP1; PRKCI; CDKN1B; PRKD1; PRKCD; |
| | RUNX2; KLF4; YY1; NCOA3; CDKN1A; NCOA2; SPP1; |
| | LRP5; CEBPB; FOXO1; PRKCA |
| TGF-beta Signaling | EP300; SMAD2; SMURF1; MAPK1; SMAD3; SMAD1; |
| | FOS; MAPK8; MAPK3; KRAS; MAPK9; RUNX2; |
| | SERPINE1; RAF1; MAP3K7; CREBBP; MAP2K2; |
| | MAP2K1; TGFBR1; SMAD4; JUN; SMAD5 |
| Toll-like Receptor | IRAK1; EIF2AK2; MYD88; TRAF6; PPARA; ELK1; |
| Signaling | IKBKB; FOS; NFKB2; MAP3K14; MAPK8; MAPK13; |
| | RELA; TLR4; MAPK14; IKBKG; RELB; MAP3K7; CHUK; |
| | NFKB1; TLR2; JUN |
| p38 MAPK Signaling | HSPB1; IRAK1; TRAF6; MAPKAPK2; ELK1; FADD; FAS; |
| | CREB1; DDIT3; RPS6KA4; DAXX; MAPK13; TRAF2; |
| | MAPK14; TNF; MAP3K7; TGFBR1; MYC; ATF4; IL1R1; |
| | SRF; STAT1 |
| Neurotrophin/TRK | NTRK2; MAPK1; PTPN11; PIK3CA; CREB1; FOS; |
| Signaling | PIK3CB; PIK3C3; MAPK8; MAPK3; KRAS; PIK3C2A; |
| | RAF1; MAP2K2; AKT1; PIK3R1; PDPK1; MAP2K1; |
| | CDC42; JUN; ATF4 |
| FXR/RXR Activation | INS; PPARA; FASN; RXRA; AKT2; SDC1; MAPK8; |
| | APOB; MAPK10; PPARG; MTTP; MAPK9; PPARGC1A; |
| | TNF; CREBBP; AKT1; SREBF1; FGFR4; AKT3; FOXO1 |
| Synaptic Long Term | PRKCE; RAP1A; EP300; PRKCZ; MAPK1; CREB1; |
| Potentiation | PRKCI; GNAQ; CAMK2A; PRKD1; MAPK3; KRAS; |
| | PRKCD; PPP1CC; RAF1; CREBBP; MAP2K2; MAP2K1; |
| | ATF4; PRKCA |
| Calcium Signaling | RAP1A; EP300; HDAC4; MAPK1; HDAC5; CREB1; |
| | CAMK2A; MYH9; MAPK3; HDAC2; HDAC7A; HDAC11; |
| | HDAC9; HDAC3; CREBBP; CALR; CAMKK2; ATF4; |
| | HDAC6 |
| EGF Signaling | ELK1; MAPK1; EGFR; PIK3CA; FOS; PIK3CB; PIK3C3; |
| | MAPK8; MAPK3; PIK3C2A; RAF1; JAK1; PIK3R1; |
| | STAT3; MAP2K1; JUN; PRKCA; SRF; STAT1 |
| Hypoxia Signaling in the | EDN1; PTEN; EP300; NQO1; UBE2I; CREB1; ARNT; |
| Cardiovascular System | HIF1A; SLC2A4; NOS3; TP53; LDHA; AKT1; ATM; |
| | VEGFA; JUN; ATF4; VHL; HSP90AA1 |
| LPS/IL-1 Mediated | IRAK1; MYD88; TRAF6; PPARA; RXRA; ABCA1; |
| Inhibition of | MAPK8; ALDH1A1; GSTP1; MAPK9; ABCB1; TRAF2; |
| RXR Function | TLR4; TNF; MAP3K7; NR1H2; SREBF1; JUN; IL1R1 |
| LXR/RXR Activation | FASN; RXRA; NCOR2; ABCA1; NFKB2; IRF3; RELA; |
| | NOS2A; TLR4; TNF; RELB; LDLR; NR1H2; NFKB1; |
| | SREBF1; IL1R1; CCL2; IL6; MMP9 |
| Amyloid Processing | PRKCE; CSNK1E; MAPK1; CAPNS1; AKT2; CAPN2; |
| | CAPN1; MAPK3; MAPK13; MAPT; MAPK14; AKT1; |
| | PSEN1; CSNK1A1; GSK3B; AKT3; APP |
| IL-4 Signaling | AKT2; PIK3CA; PIK3CB; PIK3C3; IRS1; KRAS; SOCS1; |
| | PTPN6; NR3C1; PIK3C2A; JAK1; AKT1; JAK2; PIK3R1; |
| | FRAP1; AKT3; RPS6KB1 |
| Cell Cycle: G2/M DNA | EP300; PCAF; BRCA1; GADD45A; PLK1; BTRC; |
| Damage Checkpoint | CHEK1; ATR; CHEK2; YWHAZ; TP53; CDKN1A; |
| Regulation | PRKDC; ATM; SFN; CDKN2A |
| Nitric Oxide Signaling in | KDR; FLT1; PGF; AKT2; PIK3CA; PIK3CB; PIK3C3; |
| the Cardiovascular | CAV1; PRKCD; NOS3; PIK3C2A; AKT1; PIK3R1; |
| System | VEGFA; AKT3; HSP90AA1 |
| Purine Metabolism | NME2; SMARCA4; MYH9; RRM2; ADAR; EIF2AK4; |
| | PKM2; ENTPD1; RAD51; RRM2B; TJP2; RAD51C; |
| | NT5E; POLD1; NME1 |
| CAMP-mediated Signaling | RAP1A; MAPK1; GNAS; CREB1; CAMK2A; MAPK3; |
| | SRC; RAF1; MAP2K2; STAT3; MAP2K1; BRAF; ATF4 |
| Mitochondrial Dysfunction | SOD2; MAPK8; CASP8; MAPK10; MAPK9; CASP9; |
| Notch Signaling | PARK7; PSEN1; PARK2; APP; CASP3 |
| | HES1; JAG1; NUMB; NOTCH4; ADAM17; NOTCH2; |
| | PSEN1; NOTCH3; NOTCH1; DLL4 |
| Endoplasmic Reticulum | HSPA5; MAPK8; XBP1; TRAF2; ATF6; CASP9; ATF4; |
| Stress Pathway | EIF2AK3; CASP3 |
| Pyrimidine Metabolism | NME2; AICDA; RRM2; EIF2AK4; ENTPD1; RRM2B; |
| | NT5E; POLD1; NME1 |
| Parkinson's Signaling | UCHL1; MAPK8; MAPK13; MAPK14; CASP9; PARK7; |
| | PARK2; CASP3 |
| Cardiac & Beta Adrenergic | GNAS; GNAQ; PPP2R1A; GNB2L1; PPP2CA; PPP1CC; |
| Signaling | PPP2R5C |
| Glycolysis/Gluconeogenesis | HK2; GCK; GPI; ALDH1A1; PKM2; LDHA; HK1 |
| Interferon Signaling | IRF1; SOCS1; JAK1; JAK2; IFITM1; STAT1; IFIT3 |
| Sonic Hedgehog Signaling | ARRB2; SMO; GLI2; DYRK1A; GLI1; GSK3B; DYRK1B |
| Glycerophospholipid | PLD1; GRN; GPAM; YWHAZ; SPHK1; SPHK2 |
| Metabolism | |
| Phospholipid Degradation | PRDX6; PLD1; GRN; YWHAZ; SPHK1; SPHK2 |
| Tryptophan Metabolism | SIAH2; PRMT5; NEDD4; ALDH1A1; CYP1B1; SIAH1 |
| Lysine Degradation | SUV39H1; EHMT2; NSD1; SETD7; PPP2R5C |
| Nucleotide Excision Repair | ERCC5; ERCC4; XPA; XPC; ERCC1 |
| Pathway | |
| Starch and Sucrose | UCHL1; HK2; GCK; GPI; HK1 |
| Metabolism | |
| Aminosugars Metabolism | NQO1; HK2; GCK; HK1 |
| Arachidonic Acid | PRDX6; GRN; YWHAZ; CYP1B1 |
| Metabolism | |
| Circadian Rhythm Signaling | CSNK1E; CREB1; ATF4; NR1D1 |
| Coagulation System | BDKRB1; F2R; SERPINE1; F3 |
| Dopamine Receptor | PPP2R1A; PPP2CA; PPP1CC; PPP2R5C |
| Signaling | |
| Glutathione Metabolism | IDH2; GSTP1; ANPEP; IDH1 |
| Glycerolipid Metabolism | ALDH1A1; GPAM; SPHK1; SPHK2 |
| Linoleic Acid Metabolism | PRDX6; GRN; YWHAZ; CYP1B1 |
| Methionine Metabolism | DNMT1; DNMT3B; AHCY; DNMT3A |
| Pyruvate Metabolism | GLO1; ALDH1A1; PKM2; LDHA |
| Arginine and Proline | ALDH1A1; NOS3; NOS2A |
| Metabolism | |
| Eicosanoid Signaling | PRDX6; GRN; YWHAZ |
| Fructose and Mannose | HK2; GCK; HK1 |
| Metabolism | |
| Galactose Metabolism | HK2; GCK; HK1 |
| Stilbene, Coumarine and | PRDX6; PRDX1; TYR |
| Lignin Biosynthesis | |
| Antigen Presentation | CALR; B2M |
| Pathway | |
| Biosynthesis of Steroids | NQO1; DHCR7 |
| Butanoate Metabolism | ALDH1A1; NLGN1 |
| Citrate Cycle | IDH2; IDH1 |
| Fatty Acid Metabolism | ALDH1A1; CYP1B1 |
| Glycerophospholipid | PRDX6; CHKA |
| Metabolism | |
| Histidine Metabolism | PRMT5; ALDH1A1 |
| Inositol Metabolism | ERO1L; APEX1 |
| Metabolism of Xenobiotics | GSTP1; CYP1B1 |
| by Cytochrome p450 | |
| Methane Metabolism | PRDX6; PRDX1 |
| Phenylalanine Metabolism | PRDX6; PRDX1 |
| Propanoate Metabolism | ALDH1A1; LDHA |
| Selenoamino Acid | PRMT5; AHCY |
| Metabolism | |
| Sphingolipid Metabolism | SPHK1; SPHK2 |
| Aminophosphonate | PRMT5 |
| Metabolism | |
| Androgen and Estrogen | PRMT5 |
| Metabolism | |
| Ascorbate and Aldarate | ALDH1A1 |
| Metabolism | |
| Bile Acid Biosynthesis | ALDH1A1 |
| Cysteine Metabolism | LDHA |
| Fatty Acid Biosynthesis | FASN |
| Glutamate Receptor | GNB2L1 |
| Signaling | |
| NRF2-mediated Oxidative | PRDX1 |
| Stress Response | |
| Pentose Phosphate | GPI |
| Pathway | |
| Pentose and Glucuronate | UCHL1 |
| Interconversions | |
| Retinol Metabolism | ALDH1A1 |
| Riboflavin Metabolism | TYR |
| Tyrosine Metabolism | PRMT5, TYR |
| Ubiquinone Biosynthesis | PRMT5 |
| Valine, Leucine and | ALDH1A1 |
| Isoleucine Degradation | |
| Glycine, Serine and | CHKA |
| Threonine Metabolism | |
| Lysine Degradation | ALDH1A1 |
| Pain/Taste | TRPM5; TRPA1 |
| Pain | TRPM7; TRPC5; TRPC6; TRPC1; Cnr1; cnr2; Grk2; |
| | Trpa1; Pomc; Cgrp; Crf; Pka; Era; Nr2b; TRPM5; Prkaca; |
| | Prkacb; Prkar1a; Prkar2a |
| Mitochondrial Function | AIF; CytC; SMAC (Diablo); Aifm-1; Aifm-2 |
| Developmental Neurology | BMP-4; Chordin (Chrd); Noggin (Nog); WNT (Wnt2; |
| | Wnt2b; Wnt3a; Wnt4; Wnt5a; Wnt6; Wnt7b; Wnt8b; |
| | Wnt9a; Wnt9b; Wnt10a; Wnt10b; Wnt16); beta-catenin; |
| | Dkk-1; Frizzled related proteins; Otx-2; Gbx2; FGF-8; |
| | Reelin; Dab1; unc-86 (Pou4f1 or Brn3a); Numb; Reln |

[0595] In an aspect, the invention provides a method of individualized or personalized treatment of a genetic disease in a subject in need of such treatment comprising: (a) introducing one or more mutations ex vivo in a tissue, organ or a cell line, or in vivo in a transgenic non-human mammal, comprising delivering to cell(s) of the tissue, organ, cell or mammal a composition comprising the particle delivery system or the delivery system or the virus particle of any one of the above embodiment or the cell of any one of the above embodiment, wherein the specific mutations or precise sequence substitutions are or have been correlated to the genetic disease; (b) testing treatment(s) for the genetic disease on the cells to which the vector has been delivered that have the specific mutations or precise sequence substitutions correlated to the genetic disease; and (c) treating the subject based on results from the testing of treatment(s) of step (b).

### Mitochondrial Applications

[0596] The disclosure herein provides for a composition for enhancing intra-mitochondrial protein translation and/or mitochondrial respiratory chain activity comprising a CAST IB system that modifies an enhancer region of a mitochondrial gene.

[0597] In an embodiment, the subject is affected by age-related mitochondrial dysfunction or decreased mitochondrial activity not associated with mitochondrial disease. In an embodiment, the composition is co-administered with another therapeutic or supplement meant to counter age-related deficiencies and/or increase lifespan.

[0598] In an embodiment, provided herein the subject in need thereof has, or is suspected of having, a mitochondrial disease, optionally wherein a symptom of the disease is mitochondrial dysfunction or a reduced number of mitochondria.

[0599] In an embodiment, the mitochondrial disease is caused by a mutation in either the mitochondrial DNA (mtDNA) or nuclear DNA (nucDNA). The mitochondrial disease is a monogenic mitochondrial disease. In an embodiment, the mitochondrial disease is a homoplasmic or a heteroplasmic mitochondrial DNA (mtDNA) disease.

[0600] In embodiments, the CRISPR-associated transposase (CAST) system comprising i) a catalytically inactive Cas polypeptide and a transposase fused to or otherwise capable of associating with the Cas polypeptide ii) a guide molecule capable of forming a complex with the Cas polypeptide and directing the complex to a target insertion site; and iii) a donor construct comprising the polynucleotide encoding a mitochondrial gene or a functional component thereof, and one or more transposase recognition sequences capable of facilitating recognition by and transposase, whereby the transpose facilitates insertion of the polynucleotide encoding mitochondrial protein at the target insertion site.

[0601] In an aspect, the systems herein provide for a composition for enhancing expression of intra-mitochondrial protein translation and/or respiratory chain activity and/or mitochondrial oxidative phosphorylation (OXPHOS) activity comprising administering one or more agents effective to increase mitochondrial gene and/or protein and/or activity.

[0602] Databases and/or tools can be used to identify and/or characterize a mtDNA mutation in a mtDNA sequence can include PhyloTree (www.phylotree.org), Haplogrep (haplogrep.i-med.ac.at), MSeqDR (mseqdr.org/MITO/genes), AmtDB (amtdb.org), HmtDB (www.hmtdb.uniba.it), PON tRNA (structure.bmc.lu.se/PON-mt-tRNA/), MitImpact (mitimpact.css-mendel.it), HvrBase++ (hvrbase.cibiv.univie.ac.at), GiiB-JST mtSNP (mtsnp.tmig.or.jp/mtsnp/index_e.shtml), HmtVar (www.hmtvar.uniba.it), mt-DNA Server (mtdna-server.uibk.ac.at/index.html), EMPOP CR (empop.online), Mitominer (mitominer.mrc-mbu.cam.ac.uk/release-4.0/begin.do), POLG Pathogenicity Server (www.mitomap.org/polg/), MitoWheel (www.mitomap.org/MITOMAP), POLG @NIEHS (tools.niehs.nih.gov//polg/), MitoBreak (mitobreak.portugene.com/cgi-bin/Mitobreak_home.cgi), MitoAge (www.mitoage.info), Mamit-tRNA/mitotRNAdb (mttrna.bioinf.uni-leipzig.de/mtDataOutput/), MitoFit (www.mitofit.org/index.php/MitoFit), Misynpat (misynpat.org/misynpat/).

### Infectious Diseases

[0603] In an embodiment, the composition, system(s), or component(s) thereof can be used to diagnose, prognose, treat, and/or prevent an infectious disease caused by a microorganism, such as bacteria, virus, fungi, parasites, or combinations thereof.

[0604] In an embodiment, the system(s) or component(s) thereof can be capable of targeting specific microorganism within a mixed population. Exemplary methods of such techniques are described in e.g., Gomaa A A, Klumpe H E, Luo M L, Selle K, Barrangou R, Beisel C L. 2014. Programmable removal of bacterial strains by use of genome-targeting composition, systems. mBio 5:e00928-13; Citorik R J, Mimee M, Lu T K. 2014. Sequence-specific antimicrobials using efficiently delivered RNA-guided nucleases. Nat Biotechnol 32:1141-1145, the teachings of which can be adapted for use with the compositions, systems, and components thereof described herein.

[0605] In an embodiment, the composition, system(s) and/or components thereof can be capable of targeting pathogenic and/or drug-resistant microorganisms, such as bacteria, virus, parasites, and fungi. In an embodiment, the composition, system(s) and/or components thereof can be capable of targeting and modifying one or more polynucleotides in a pathogenic microorganism such that the microorganism is less virulent, killed, inhibited, or is otherwise rendered incapable of causing disease and/or infecting and/or replicating in a host cell.

[0606] In an embodiment, the pathogenic bacteria that can be targeted and/or modified by the composition, system(s) and/or component(s) thereof described herein include, but are not limited to, those of the genus Actinomyces (e.g., A. israelii), Bacillus (e.g., B. anthracis, B. cereus), Bactereoides (e.g., B. fragilis), Bartonella (B. henselae, B. quintana), Bordetella (B. pertussis), Borrelia (e.g., B. burgdorferi, B. garinii, B. afzelii, and B. recurreentis), Brucella (e.g., B. abortus, B. canis, B. melitensis, and B. suis), Campylobacter (e.g., C. jejuni), Chlamydia (e.g., C. pneumoniae and C. trachomatis), Chlamydophila (e.g., C. psittaci), Clostridium (e.g., C. botulinum, C. difficile, C. perfringens. C. tetani), Corynebacterium (e.g., C. diptheriae), Enterococcus (e.g., E. Faecalis, E. faecium), Ehrlichia (E. canis and E. chaffensis) Escherichia (e.g., E. coli), Francisella (e.g., F. tularensis), Haemophilus (e.g., H. influenzae), Helicobacter (H. pylori), Klebsiella (E.g. K. pneumoniae), Legionella (e.g., L. pneumophila), Leptospira (e.g., L. interrogans, L. santarosai, L. weilii, L. noguchii), Listereia (e.g., L. monocytogeenes), Mycobacterium (e.g., M. leprae, M. tuberculosis, M. ulcerans), Mycoplasma (M. pneumoniae), Neisseria (N. gonorrhoeae and N. menigitidis), Nocardia (e.g., N. asteeroides), Pseudomonas (P. aeruginosa), Rickettsia (R. rickettsia), Salmonella (S. typhi and S. typhimurium), Shigella (S. sonnei and S. dysenteriae), Staphylococcus (S. aureus, S. epidermidis, and S. saprophyticus), Streptococcus (S. agalactiaee, S. pneumoniae, S. pyogenes), Treponema (T. pallidum), Ureaplasma (e.g., U. urealyticum), Vibrio (e.g., V. cholerae), Yersinia (e.g., Y. pestis, Y. enterocolitica, and Y. pseudotuberculosis).

[0607] In an embodiment, the pathogenic virus that can be targeted and/or modified by the composition, system, (s) and/or component(s) thereof described herein include, but are not limited to, a double-stranded DNA virus, a partly double-stranded DNA virus, a single-stranded DNA virus, a positive single-stranded RNA virus, a negative single-stranded RNA virus, or a double stranded RNA virus. In an embodiment, the pathogenic virus can be from the family Adenoviridae (e.g., Adenovirus), Herpesviridae (e.g., Herpes simplex, type 1, Herpes simplex, type 2, Varicella-zoster virus, Epstein-Barr virus, Human cytomegalovirus, Human herpesvirus, type 8), Papillomaviridae (e.g., Human papillomavirus), Polyomaviridae (e.g., BK virus, JC virus), Poxviridae (e.g., smallpox), Hepadnaviridae (e.g., Hepatitis B), Parvoviridae (e.g., Parvovirus B19), Astroviridae (e.g., Human astrovirus), Caliciviridae (e.g., Norwalk virus), Picornaviridae (e.g., coxsackievirus, hepatitis A virus, poliovirus, rhinovirus), Coronaviridae (e.g., Severe acute respiratory syndrome-related coronavirus, strains: Severe acute respiratory syndrome virus, Severe acute respiratory syndrome coronavirus 2 (COVID-19), Flaviviridae (e.g., Hepatitis C virus, yellow fever virus, dengue virus, West Nile virus, TBE virus), Togaviridae (e.g., Rubella virus), Hepeviridae (e.g., Hepatitis E virus), Retroviridae (Human immunodeficiency virus (HIV)), Orthomyxoviridae (e.g., Influenza virus), Arenaviridae (e.g., Lassa virus), Bunyaviridae (e.g., Crimean-Congo hemorrhagic fever virus, Hantaan virus), Filoviridae (e.g., Ebola virus and Marburg virus), Paramyxoviridae (e.g., Measles virus, Mumps virus, Parainfluenza virus, Respiratory syncytial virus), Rhabdoviridae (Rabies virus), Hepatitis D virus, Reoviridae (e.g., Rotavirus, Orbivirus, Coltivirus, Banna virus).

[0608] In an embodiment, the pathogenic fungi that can be targeted and/or modified by the composition, system, (s) and/or component(s) thereof described herein include, but are not limited to, those of the genus Candida (e.g. C. albicans), Aspergillus (e.g., A. fumigatus, A. flavus, A. clavatus), Cryptococcus (e.g., C. neoformans, C. gattii), Histoplasma (H. capsulatum), Pneumocystis (e.g. P. jiroveecii), Stachybotrys (e.g., S. chartarum).

[0609] In an embodiment, the pathogenic parasites that can be targeted and/or modified by the composition, system(s), and/or component(s) thereof described herein include, but are not limited to, protozoa, helminths, and ectoparasites. In an embodiment, the pathogenic protozoa that can be targeted and/or modified by the composition, system(s) and/or component(s) thereof described herein include, but are not limited to, those from the groups Sarcodina (e.g., ameba such as Entamoeba), Mastigophora (e.g., flagellates such as Giardia and Leishmania), Cilophora (e.g., ciliates such as Balantidum), and sporozoa (e.g., plasmodium and Cryptosporidium). In an embodiment, the pathogenic helminths that can be targeted and/or modified by the composition, system(s), and/or component(s) thereof described herein include, but are not limited to, flatworms (platyhelminths), thorny-headed worms (acanthoceephalins), and roundworms (nematodes). In an embodiment, the pathogenic ectoparasites that can be targeted and/or modified by the composition, system(s), and/or component(s) thereof described herein include, but are not limited to, ticks, fleas, lice, and mites.

[0610] In an embodiment, the pathogenic parasite that can be targeted and/or modified by the composition, system(s), and/or component(s) thereof described herein include, but are not limited to, Acanthamoeba spp., Balamuthia mandrillaris, Babesiosis spp. (e.g., Babesia B. divergens, B. bigemina, B. equi, B. microfti, B. duncani), Balantidiasis spp. (e.g., Balantidium coli), Blastocystis spp., Cryptosporidium spp., Cyclosporiasis spp. (e.g., Cyclospora cayetanensis), Dientamoebiasis spp. (e.g., Dientamoeba fragilis), Amoebiasis spp. (e.g., Entamoeba histolytica), Giardiasis spp. (e.g., Giardia lamblia), Isosporiasis spp. (e.g., Isospora belli), Leishmania spp., Naegleria spp. (e.g., Naegleria fowleri), Plasmodium spp. (e.g., Plasmodium falciparum, Plasmodium vivax, Plasmodium ovale curtisi, Plasmodium ovale wallikeri, Plasmodium malariae, Plasmodium knowlesi), Rhinosporidiosis spp. (e.g., Rhinosporidium seeberi), Sarcocystosis spp. (e.g., Sarcocystis bovihominis, Sarcocystis suihominis), Toxoplasma spp. (e.g., Toxoplasma gondii), Trichomonas spp. (e.g., Trichomonas vaginalis), Trypanosoma spp. (e.g., Trypanosoma brucei), Trypanosoma spp. (e.g., Trypanosoma cruzi), Tapeworm (e.g., Cestoda, Taenia multiceps, Taenia saginata, Taenia solium), Diphyllobothrium latum spp., Echinococcus spp. (e.g., Echinococcus granulosus, Echinococcus multilocularis, E. vogeli, E. oligarthrus), Hymenolepis spp. (e.g., Hymenolepis nana, Hymenolepis diminuta), Bertiella spp. (e.g., Bertiella mucronata, Bertiella studeri), Spirometra (e.g., Spirometra erinaceieuropaei), Clonorchis spp. (e.g., Clonorchis sinensis; Clonorchis viverrini), Dicrocoelium spp. (e.g., Dicrocoelium dendriticum), Fasciola spp. (e.g., Fasciola hepatica, Fasciola gigantica), Fasciolopsis spp. (e.g., Fasciolopsis buski), Metagonimus spp. (e.g., Metagonimus yokogawai), Metorchis spp. (e.g., Metorchis conjunctus), Opisthorchis spp. (e.g., Opisthorchis viverrini, Opisthorchis felineus), Clonorchis spp. (e.g., Clonorchis sinensis), Paragonimus spp. (e.g., Paragonimus westermani; Paragonimus africanus; Paragonimus caliensis; Paragonimus kellicotti; Paragonimus skrjabini; Paragonimus uterobilateralis), Schistosoma sp., Schistosoma spp. (e.g. Schistosoma mansoni, Schistosoma haematobium, Schistosoma japonicum, Schistosoma mekongi, and Schistosoma intercalatum), Echinostoma spp. (e.g., E. echinatum), Trichobilharzia spp. (e.g., Trichobilharzia regent), Ancylostoma spp. (e.g., Ancylostoma duodenale), Necator spp. (e.g., Necator americanus), Angiostrongylus spp., Anisakis spp., Ascaris spp. (e.g., Ascaris lumbricoides), Baylisascaris spp. (e.g., Baylisascaris procyonis), Brugia spp. (e.g., Brugia malayi, Brugia timori), Dioctophyme spp. (e.g., Dioctophyme renale), Dracunculus spp. (e.g., Dracunculus medinensis), Enterobius spp. (e.g., Enterobius vermicularis, Enterobius gregorii), Gnathostoma spp. (e.g., Gnathostoma spinigerum, Gnathostoma hispidum), Halicephalobus spp. (e.g., Halicephalobus gingivalis), Loa loa spp. (e.g., Loa loa filaria), Mansonella spp. (e.g., Mansonella streptocerca), Onchocerca spp. (e.g., Onchocerca volvulus), Strongyloides spp. (e.g., Strongyloides stercoralis), Thelazia spp. (e.g., Thelazia californiensis, Thelazia callipaeda), Toxocara spp. (e.g., Toxocara canis, Toxocara cati, Toxascaris leonine), Trichinella spp. (e.g., Trichinella spiralis, Trichinella britovi, Trichinella nelsoni, Trichinella nativa), Trichuris spp. (e.g., Trichuris trichiura, Trichuris vulpis), Wuchereria spp. (e.g., Wuchereria bancrofti), Dermatobia spp. (e.g., Dermatobia hominis), Tunga spp. (e.g., Tunga penetrans), Cochliomyia spp. (e.g., Cochliomyia hominivorax), Linguatula spp. (e.g., Linguatula serrata), Archiacanthocephala sp., Moniliformis sp. (e.g., Moniliformis moniliformis), Pediculus spp. (e.g., Pediculus humanus capitis, Pediculus humanus humanus), Pthirus spp. (e.g., Pthirus pubis), Arachnida spp. (e.g., Trombiculidae, Ixodidae, Argaside), Siphonaptera spp (e.g., Siphonaptera: Pulicinae), Cimicidae spp. (e.g., Cimex lectularius and Cimex hemipterus), Diptera spp., Demodex spp. (e.g., Demodex folliculorum/brevis/canis), Sarcoptes spp. (e.g., Sarcoptes scabiei), Dermanyssus spp. (e.g., Dermanyssus gallinae), Ornithonyssus spp. (e.g., Ornithonyssus sylviarum, Ornithonyssus bursa, Ornithonyssus bacoti), Laelaps spp. (e.g., Laelaps echidnina), Liponyssoides spp. (e.g., Liponyssoides sanguineus).

[0611] In an embodiment, the gene targets can be any of those as set forth in Table 1 of Strich and Chertow. 2019. J. Clin. Microbio. 57:4 e01307-18, which is incorporated herein as if expressed in its entirety herein.

[0612] In an embodiment, the method can include delivering a composition, system, and/or component thereof to a pathogenic organism described herein, allowing the composition, system, and/or component thereof to specifically bind and modify one or more targets in the pathogenic organism, whereby the modification kills, inhibits, reduces the pathogenicity of the pathogenic organism, or otherwise renders the pathogenic organism non-pathogenic. In an embodiment, delivery of the composition, system, occurs in vivo (i.e., in the subject being treated). In an embodiment occurs by an intermediary, such as microorganism or phage that is non-pathogenic to the subject but is capable of transferring polynucleotides and/or infecting the pathogenic microorganism. In an embodiment, the intermediary microorganism can be an engineered bacteria, virus, or phage that contains the composition, system(s), and/or component(s) thereof and/or CRISPR-Cas vectors and/or vector systems. The method can include administering an intermediary microorganism containing the composition, system(s), and/or component(s) thereof and/or CRISPR-Cas vectors and/or vector systems to the subject to be treated. The intermediary microorganism can then produce the CRISPR-system and/or component thereof or transfer a composition, system, polynucleotide to the pathogenic organism. In embodiments, where the CRISPR-system and/or component thereof, vector, or vector system is transferred to the pathogenic microorganism, the composition, system, or component thereof is then produced in the pathogenic microorganism and modifies the pathogenic microorganism such that it is less virulent, killed, inhibited, or is otherwise rendered incapable of causing disease and/or infecting and/or replicating in a host or cell thereof.

[0613] In an embodiment, where the pathogenic microorganism inserts its genetic material into the host cell's genome (e.g., a virus), the composition, system can be designed such that it modifies the host cell's genome such that the viral DNA or cDNA cannot be replicated by the host cell's machinery into a functional virus. In an embodiment, where the pathogenic microorganism inserts its genetic material into the host cell's genome (e.g., a virus), the composition, system, can be designed such that it modifies the host cell's genome such that the viral DNA or cDNA is deleted from the host cell's genome.

[0614] It will be appreciated that inhibiting or killing the pathogenic microorganism, the disease and/or condition that its infection causes in the subject can be treated or prevented. Thus, also provided herein are methods of treating and/or preventing one or more diseases or symptoms thereof caused by any one or more pathogenic microorganisms, such as any of those described herein.

### Mitochondrial Diseases

[0615] Some of the most challenging mitochondrial disorders arise from mutations in mitochondrial DNA (mtDNA), a high copy number genome that is maternally inherited. In an embodiment, mtDNA mutations can be modified using a composition, system, described herein. In an embodiment, the mitochondrial disease that can be diagnosed, prognosed, treated, and/or prevented can be MELAS (mitochondrial myopathy encephalopathy, and lactic acidosis and stroke-like episodes), CPEO/PEO (chronic progressive external ophthalmoplegia syndrome/progressive external ophthalmoplegia), KSS (Kearns-Sayre syndrome), MIDD (maternally inherited diabetes and deafness), MERRF (myoclonic epilepsy associated with ragged red fibers), NIDDM (noninsulin-dependent diabetes mellitus), LHON (Leber hereditary optic neuropathy), LS (Leigh Syndrome) an aminoglycoside induced hearing disorder, NARP (neuropathy, ataxia, and pigmentary retinopathy), Extrapyramidal disorder with akinesia-rigidity, psychosis and SNHL, Nonsyndromic hearing loss a cardiomyopathy, an encephalomyopathy, Pearson's syndrome, or a combination thereof.

[0616] In an embodiment, the mtDNA of a subject can be modified in vivo or ex vivo. In an embodiment, where the mtDNA is modified ex vivo, after modification the cells containing the modified mitochondria can be administered back to the subject. In an embodiment, the composition, system, or component thereof can be capable of correcting an mtDNA mutation, or a combination thereof.

[0617] In an embodiment, at least one of the one or more mtDNA mutations is selected from the group consisting of: A3243G, C3256T, T3271C, G1019A, A1304T, A15533G, C1494T, C4467A, T1658C, G12315A, A3421G, A8344G, T8356C, G8363A, A13042T, T3200C, G3242A, A3252G, T3264C, G3316A, T3394C, T14577C, A4833G, G3460A, G9804A, G11778A, G14459A, A14484G, G15257A, T8993C, T8993G, G10197A, G13513A, T1095C, C1494T, A1555G, G1541A, C1634T, A3260G, A4269G, T7587C, A8296G, A8348G, G8363A, T9957C, T9997C, G12192A, C12297T, A14484G, G15059A, duplication of CCCCCTCCCC-tandem (SEQ ID NO: 1209) repeats at positions 305-314 and/or 956-965, deletion at positions from 8,469-13,447, 4,308-14,874, and/or 4,398-14,822, 961ins/delC, the mitochondrial common deletion (e.g. mtDNA 4,977 bp deletion), and combinations thereof.

[0618] In an embodiment, the mitochondrial mutation can be any mutation as set forth in or as identified by use of one or more bioinformatic tools available at Mitomap available at mitomap.org. Such tools include, but are not limited to, “Variant Search, aka Market Finder”, Find Sequences for Any Haplogroup, aka “Sequence Finder”, “Variant Info”, “POLG Pathogenicity Prediction Server”, “MITOMASTER”, “Allele Search”, “Sequence and Variant Downloads”, “Data Downloads”. MitoMap contains reports of mutations in mtDNA that can be associated with disease and maintains a database of reported mitochondrial DNA Base Substitution Diseases: rRNA/tRNA mutations.

[0619] In an embodiment, the method includes delivering a composition, system, and/or a component thereof to a cell, and more specifically one or more mitochondria in a cell, allowing the composition, system, and/or component thereof to modify one or more target polynucleotides in the cell, and more specifically one or more mitochondria in the cell. The target polynucleotides can correspond to a mutation in the mtDNA, such as any one or more of those described herein. In an embodiment, the modification can alter a function of the mitochondria such that the mitochondria functions normally or at least is/are less dysfunctional as compared to unmodified mitochondria. Modification can occur in vivo or ex vivo. Where modification is performed ex vivo, cells containing modified mitochondria can be administered to a subject in need thereof in an autologous or allogenic manner.

### Microbiome Modification

[0620] Microbiomes play important roles in health and disease. For example, the gut microbiome can play a role in health by controlling digestion, preventing growth of pathogenic microorganisms and have been suggested to influence mood and emotion. Imbalanced microbiomes can promote disease and are suggested to contribute to weight gain, unregulated blood sugar, high cholesterol, cancer, and other disorders. A healthy microbiome has a series of joint characteristics that can be distinguished from non-healthy individuals, thus detection and identification of the disease-associated microbiome can be used to diagnose and detect disease in an individual. The compositions, systems, and components thereof can be used to screen the microbiome cell population and be used to identify a disease associated microbiome. Cell screening methods utilizing compositions, systems, and components thereof are described elsewhere herein and can be applied to screening a microbiome, such as a gut, skin, vagina, and/or oral microbiome, of a subject.

[0621] In an embodiment, the microbe population of a microbiome in a subject can be modified using a composition, system, and/or component thereof described herein. In an embodiment, the composition, system, and/or component thereof can be used to identify and select one or more cell types in the microbiome and remove them from the microbiome population. Exemplary methods of selecting cells using a composition, system, and/or component thereof are described elsewhere herein. In this way the make-up or microorganism profile of the microbiome can be altered. In an embodiment, the alteration causes a change from a diseased microbiome composition to a healthy microbiome composition. In this way the ratio of one type or species of microorganism to another can be modified, such as going from a diseased ratio to a healthy ratio. In an embodiment, the cells selected are pathogenic microorganisms.

[0622] In an embodiment, the compositions, systems, described herein can be used to modify a polynucleotide in a microorganism of a microbiome in a subject. In an embodiment, the microorganism is a pathogenic microorganism. In an embodiment, the microorganism is a commensal and non-pathogenic microorganism. Methods of modifying polynucleotides in a cell in the subject are described elsewhere herein and can be applied to these embodiments.

### Adoptive Therapy

[0623] The compositions, systems, and components thereof described herein can be used to modify cells for an adoptive cell therapy. In an aspect of the invention, methods and compositions which involve editing a target nucleic acid sequence, or modulating expression of a target nucleic acid sequence, and applications thereof in connection with cancer immunotherapy are comprehended by adapting the composition, system, of the present invention.

[0624] As used herein, “ACT”, “adoptive cell therapy” and “adoptive cell transfer” may be used interchangeably. In an embodiment, Adoptive cell therapy (ACT) can refer to the transfer of cells to a patient with the goal of transferring the functionality and characteristics into the new host by engraftment of the cells (see, e.g., Mettananda et al., Editing an α-globin enhancer in primary human hematopoietic stem cells as a treatment for β-thalassemia, Nat Commun. 2017 Sep. 4; 8(1):424). As used herein, the term “engraft” or “engraftment” refers to the process of cell incorporation into a tissue of interest in vivo through contact with existing cells of the tissue. Adoptive cell therapy (ACT) can refer to the transfer of cells, most commonly immune-derived cells, back into the same patient or into a new recipient host with the goal of transferring the immunologic functionality and characteristics into the new host. If possible, use of autologous cells helps the recipient by minimizing GVHD issues. The adoptive transfer of autologous tumor infiltrating lymphocytes (TIL) (Zacharakis et al., (2018) Nat Med. 2018 June; 24(6):724-730; Besser et al., (2010) Clin. Cancer Res 16(9) 2646-55; Dudley et al., (2002) Science 298(5594):850-4; and Dudley et al., (2005) Journal of Clinical Oncology 23(10):2346-57.) or genetically re-directed peripheral blood mononuclear cells (Johnson et al., (2009) Blood 114(3):535-46; and Morgan et al., (2006) Science 314(5796) 126-9) has been used to successfully treat patients with advanced solid tumors, including melanoma, metastatic breast cancer and colorectal carcinoma, as well as patients with CD19-expressing hematologic malignancies (Kalos et al., (2011) Science Translational Medicine 3 (95):95ra73). In an embodiment, allogenic cells immune cells are transferred (see, e.g., Ren et al., (2017) Clin Cancer Res 23 (9) 2255-2266). As described further herein, allogenic cells can be edited to reduce alloreactivity and prevent graft-versus-host disease. Thus, use of allogenic cells allows for cells to be obtained from healthy donors and prepared for use in patients as opposed to preparing autologous cells from a patient after diagnosis.

[0625] Aspects of the invention involve the adoptive transfer of immune system cells, such as T cells, specific for selected antigens, such as tumor associated antigens or tumor specific neoantigens (see, e.g., Maus et al., 2014, Adoptive Immunotherapy for Cancer or Viruses, Annual Review of Immunology, Vol. 32:189-225; Rosenberg and Restifo, 2015, Adoptive cell transfer as personalized immunotherapy for human cancer, Science Vol. 348 no. 6230 pp. 62-68; Restifo et al., 2015, Adoptive immunotherapy for cancer: harnessing the T cell response. Nat. Rev. Immunol. 12(4):269-281; and Jenson and Riddell, 2014, Design and implementation of adoptive therapy with chimeric antigen receptor-modified T cells. Immunol Rev. 257(1):127-144; and Rajasagi et al., 2014, Systematic identification of personal tumor-specific neoantigens in chronic lymphocytic leukemia. Blood. 2014 Jul. 17; 124(3):453-62).

[0626] In an embodiment, an antigen (such as a tumor antigen) to be targeted in adoptive cell therapy (such as particularly CAR or TCR T-cell therapy) of a disease (such as particularly of tumor or cancer) may be selected from a group consisting of: MRI (see, e.g., Crowther, et al., 2020, Genome-wide CRISPR-Cas9 screening reveals ubiquitous T cell cancer targeting via the monomorphic MHC class I-related protein MR1, Nature Immunology volume 21, pages 178-185), B cell maturation antigen (BCMA) (see, e.g., Friedman et al., Effective Targeting of Multiple BCMA-Expressing Hematological Malignancies by Anti-BCMA CAR T Cells, Hum Gene Ther. 2018 Mar. 8; Berdeja J G, et al. Durable clinical responses in heavily pretreated patients with relapsed/refractory multiple myeloma: updated results from a multicenter study of bb2121 anti-Bcma CAR T cell therapy. Blood. 2017; 130:740; and Mouhieddine and Ghobrial, Immunotherapy in Multiple Myeloma: The Era of CAR T Cell Therapy, Hematologist, May-June 2018, Volume 15, issue 3); PSA (prostate-specific antigen); prostate-specific membrane antigen (PSMA); PSCA (Prostate stem cell antigen); Tyrosine-protein kinase transmembrane receptor ROR1; fibroblast activation protein (FAP); Tumor-associated glycoprotein 72 (TAG72); Carcinoembryonic antigen (CEA); Epithelial cell adhesion molecule (EPCAM); Mesothelin; Human Epidermal growth factor Receptor 2 (ERBB2 (Her2/neu)); Prostase; Prostatic acid phosphatase (PAP); elongation factor 2 mutant (ELF2M); Insulin-like growth factor 1 receptor (IGF-1R); gplOO; BCR-ABL (breakpoint cluster region-Abelson); tyrosinase; New York esophageal squamous cell carcinoma 1 (NY-ESO-1); K-light chain, LAGE (L antigen); MAGE (melanoma antigen); Melanoma-associated antigen 1 (MAGE-A1); MAGE A3; MAGE A6; legumain; Human papillomavirus (HPV) E6; HPV E7; prostein; survivin; PCTA1 (Galectin 8); Melan-A/MART-1; Ras mutant; TRP-1 (tyrosinase related protein 1, or gp75); Tyrosinase-related Protein 2 (TRP2); TRP-2/INT2 (TRP-2/intron 2); RAGE (renal antigen); receptor for advanced glycation end products 1 (RAGE1); Renal ubiquitous 1, 2 (RU1, RU2); intestinal carboxyl esterase (ICE); Heat shock protein 70-2 (HSP70-2) mutant; thyroid stimulating hormone receptor (TSHR); CD123; CD171; CD19; CD20; CD22; CD26; CD30; CD33; CD44v7/8 (cluster of differentiation 44, exons 7/8); CD53; CD92; CD100; CD148; CD150; CD200; CD261; CD262; CD362; CS-1 (CD2 subset 1, CRACC, SLAMF7, CD319, and 19A24); C-type lectin-like molecule-1 (CLL-1); ganglioside GD3 (aNeu5Ac(2-8)aNeu5Ac(2-3)bDGalp(1-4)bDGlcp(1-1)Cer); Tn antigen (Tn Ag); Fms-Like Tyrosine Kinase 3 (FLT3); CD38; CD138; CD44v6; B7H3 (CD276); KIT (CD117); Interleukin-13 receptor subunit alpha-2 (IL-13Ra2); Interleukin 11 receptor alpha (IL-11Ra); prostate stem cell antigen (PSCA); Protease Serine 21 (PRSS21); vascular endothelial growth factor receptor 2 (VEGFR2); Lewis (Y) antigen; CD24; Platelet-derived growth factor receptor beta (PDGFR-beta); stage-specific embryonic antigen-4 (SSEA-4); Mucin 1, cell surface associated (MUC1); mucin 16 (MUC16); epidermal growth factor receptor (EGFR); epidermal growth factor receptor variant III (EGFRvIII); neural cell adhesion molecule (NCAM); carbonic anhydrase IX (CAIX); Proteasome (Prosome, Macropain) Subunit, Beta Type, 9 (LMP2); ephrin type-A receptor 2 (EphA2); Ephrin B2; Fucosyl GM1; sialyl Lewis adhesion molecule (sLe); ganglioside GM3 (aNeu5Ac(2-3)bDGalp(1-4)bDGlcp(1-1)Cer); TGS5; high molecular weight-melanoma-associated antigen (HMWMAA); o-acetyl-GD2 ganglioside (OAcGD2); Folate receptor alpha; Folate receptor beta; tumor endothelial marker 1 (TEMI/CD248); tumor endothelial marker 7-related (TEM7R); claudin 6 (CLDN6); G protein-coupled receptor class C group 5, member D (GPRC5D); chromosome X open reading frame 61 (CXORF61); CD97; CD179a; anaplastic lymphoma kinase (ALK); Polysialic acid; placenta-specific 1 (PLAC1); hexasaccharide portion of globoH glycoceramide (GloboH); mammary gland differentiation antigen (NY-BR-1); uroplakin 2 (UPK2); Hepatitis A virus cellular receptor 1 (HAVCR1); adrenoceptor beta 3 (ADRB3); pannexin 3 (PANX3); G protein-coupled receptor 20 (GPR20); lymphocyte antigen 6 complex, locus K 9 (LY6K); Olfactory receptor 51E2 (OR51E2); TCR Gamma Alternate Reading Frame Protein (TARP); Wilms tumor protein (WT1); ETS translocation-variant gene 6, located on chromosome 12p (ETV6-AML); sperm protein 17 (SPA17); X Antigen Family, Member 1A (XAGE1); angiopoietin-binding cell surface receptor 2 (Tie 2); CT (cancer/testis (antigen)); melanoma cancer testis antigen-1 (MAD-CT-1); melanoma cancer testis antigen-2 (MAD-CT-2); Fos-related antigen 1; p53; p53 mutant; human Telomerase reverse transcriptase (hTERT); sarcoma translocation breakpoints; melanoma inhibitor of apoptosis (ML-IAP); ERG (transmembrane protease, serine 2 (TMPRSS2) ETS fusion gene); N-Acetyl glucosaminyl-transferase V (NA17); paired box protein Pax-3 (PAX3); Androgen receptor; Cyclin B1; Cyclin D1; v-myc avian myelocytomatosis viral oncogene neuroblastoma derived homolog (MYCN); Ras Homolog Family Member C (RhoC); Cytochrome P450 1B1 (CYP1B1); CCCTC-Binding Factor (Zinc Finger Protein)-Like (BORIS); Squamous Cell Carcinoma Antigen Recognized By T Cells-1 or 3 (SART1, SART3); Paired box protein Pax-5 (PAX5); proacrosin binding protein sp32 (OY-TES1); lymphocyte-specific protein tyrosine kinase (LCK); A kinase anchor protein 4 (AKAP-4); synovial sarcoma, X breakpoint-1, -2, -3 or -4 (SSX1, SSX2, SSX3, SSX4); CD79a; CD79b; CD72; Leukocyte-associated immunoglobulin-like receptor 1 (LAIR1); Fc fragment of IgA receptor (FCAR); Leukocyte immunoglobulin-like receptor subfamily A member 2 (LILRA2); CD300 molecule-like family member f (CD300LF); C-type lectin domain family 12 member A (CLEC12A); bone marrow stromal cell antigen 2 (BST2); EGF-like module-containing mucin-like hormone receptor-like 2 (EMR2); lymphocyte antigen 75 (LY75); Glypican-3 (GPC3); Fc receptor-like 5 (FCRL5); mouse double minute 2 homolog (MDM2); livin; alphafetoprotein (AFP); transmembrane activator and CAML Interactor (TACI); B-cell activating factor receptor (BAFF-R); V-Ki-ras2 Kirsten rat sarcoma viral oncogene homolog (KRAS); immunoglobulin lambda-like polypeptide 1 (IGLL1); 707-AP (707 alanine proline); ART-4 (adenocarcinoma antigen recognized by T4 cells); BAGE (B antigen; b-catenin/m, b-catenin/mutated); CAMEL (CTL-recognized antigen on melanoma); CAP1 (carcinoembryonic antigen peptide 1); CASP-8 (caspase-8); CDC27m (cell-division cycle 27 mutated); CDK4/m (cycline-dependent kinase 4 mutated); Cyp-B (cyclophilin B); DAM (differentiation antigen melanoma); EGP-2 (epithelial glycoprotein 2); EGP-40 (epithelial glycoprotein 40); Erbb2, 3, 4 (erythroblastic leukemia viral oncogene homolog-2, -3, 4); FBP (folate binding protein); fAchR (Fetal acetylcholine receptor); G250 (glycoprotein 250); GAGE (G antigen); GnT-V (N-acetylglucosaminyltransferase V); HAGE (helicose antigen); ULA-A (human leukocyte antigen-A); HST2 (human signet ring tumor 2); KIAA0205; KDR (kinase insert domain receptor); LDLR/FUT (low density lipid receptor/GDP L-fucose: b-D-galactosidase 2-a-L fucosyltransferase); LICAM (LI cell adhesion molecule); MC1R (melanocortin 1 receptor); Myosin/m (myosin mutated); MUM-1, -2, -3 (melanoma ubiquitous mutated 1, 2, 3); NA88-A (NA cDNA clone of patient M88); KG2D (Natural killer group 2, member D) ligands; oncofetal antigen (h5T4); p190 minor bcr-abl (protein of 190KD bcr-abl); Pml/RARa (promyelocytic leukaemia/retinoic acid receptor a); PRAME (preferentially expressed antigen of melanoma); SAGE (sarcoma antigen); TEL/AML1 (translocation Ets-family leukemia/acute myeloid leukemia 1); TPI/m (triosephosphate isomerase mutated); CD70; and any combination thereof.

[0627] In an embodiment, an antigen to be targeted in adoptive cell therapy (such as particularly CAR or TCR T-cell therapy) of a disease (such as particularly of tumor or cancer) is a tumor-specific antigen (TSA).

[0628] In an embodiment, an antigen to be targeted in adoptive cell therapy (such as particularly CAR or TCR T-cell therapy) of a disease (such as particularly of tumor or cancer) is a neoantigen.

[0629] In an embodiment, an antigen to be targeted in adoptive cell therapy (such as particularly CAR or TCR T-cell therapy) of a disease (such as particularly of tumor or cancer) is a tumor-associated antigen (TAA).

[0630] In an embodiment, an antigen to be targeted in adoptive cell therapy (such as particularly CAR or TCR T-cell therapy) of a disease (such as particularly of tumor or cancer) is a universal tumor antigen. In certain preferred embodiments, the universal tumor antigen is selected from the group consisting of: a human telomerase reverse transcriptase (hTERT), survivin, mouse double minute 2 homolog (MDM2), cytochrome P450 1B 1 (CYP1B), HER2/neu, Wilms' tumor gene 1 (WT1), livin, alphafetoprotein (AFP), carcinoembryonic antigen (CEA), mucin 16 (MUC16), MUC1, prostate-specific membrane antigen (PSMA), p53, cyclin (DI), and any combinations thereof.

[0631] In an embodiment, an antigen (such as a tumor antigen) to be targeted in adoptive cell therapy (such as particularly CAR or TCR T-cell therapy) of a disease (such as particularly of tumor or cancer) may be selected from a group consisting of: CD19, BCMA, CD70, CLL-1, MAGE A3, MAGE A6, HPV E6, HPV E7, WT1, CD22, CD171, ROR1, MUC16, and SSX2. In certain preferred embodiments, the antigen may be CD19. For example, CD19 may be targeted in hematologic malignancies, such as in lymphomas, more particularly in B-cell lymphomas, such as without limitation in diffuse large B-cell lymphoma, primary mediastinal b-cell lymphoma, transformed follicular lymphoma, marginal zone lymphoma, mantle cell lymphoma, acute lymphoblastic leukemia including adult and pediatric ALL, non-Hodgkin lymphoma, indolent non-Hodgkin lymphoma, or chronic lymphocytic leukemia. For example, BCMA may be targeted in multiple myeloma or plasma cell leukemia (see, e.g., 2018 American Association for Cancer Research (AACR) Annual meeting Poster: Allogeneic Chimeric Antigen Receptor T Cells Targeting B Cell Maturation Antigen). For example, CLL1 may be targeted in acute myeloid leukemia. For example, MAGE A3, MAGE A6, SSX2, and/or KRAS may be targeted in solid tumors. For example, HPV E6 and/or HPV E7 may be targeted in cervical cancer or head and neck cancer. For example, WT1 may be targeted in acute myeloid leukemia (AML), myelodysplastic syndromes (MDS), chronic myeloid leukemia (CML), non-small cell lung cancer, breast, pancreatic, ovarian or colorectal cancers, or mesothelioma. For example, CD22 may be targeted in B cell malignancies, including non-Hodgkin lymphoma, diffuse large B-cell lymphoma, or acute lymphoblastic leukemia. For example, CD171 may be targeted in neuroblastoma, glioblastoma, or lung, pancreatic, or ovarian cancers. For example, ROR1 may be targeted in ROR1+ malignancies, including non-small cell lung cancer, triple negative breast cancer, pancreatic cancer, prostate cancer, ALL, chronic lymphocytic leukemia, or mantle cell lymphoma. For example, MUC16 may be targeted in MUC16ecto+ epithelial ovarian, fallopian tube or primary peritoneal cancer. For example, CD70 may be targeted in both hematologic malignancies as well as in solid cancers such as renal cell carcinoma (RCC), gliomas (e.g., GBM), and head and neck cancers (HNSCC). CD70 is expressed in both hematologic malignancies as well as in solid cancers, while its expression in normal tissues is restricted to a subset of lymphoid cell types (see, e.g., 2018 American Association for Cancer Research (AACR) Annual meeting Poster: Allogeneic CRISPR Engineered Anti-CD70 CAR-T Cells Demonstrate Potent Preclinical Activity Against Both Solid and Hematological Cancer Cells).

[0632] Various strategies may for example be employed to genetically modify T cells by altering the specificity of the T cell receptor (TCR) for example by introducing new TCR a and B chains with selected peptide specificity (see U.S. Pat. No. 8,697,854; PCT Patent Publications: WO2003020763, WO2004033685, WO2004044004, WO2005114215, WO2006000830, WO2008038002, WO2008039818, WO2004074322, WO2005113595, WO2006125962, WO2013166321, WO2013039889, WO2014018863, WO2014083173; U.S. Pat. No. 8,088,379).

[0633] As an alternative to, or addition to, TCR modifications, chimeric antigen receptors (CARs) may be used in order to generate immunoresponsive cells, such as T cells, specific for selected targets, such as malignant cells, with a wide variety of receptor chimera constructs having been described (see U.S. Pat. Nos. 5,843,728; 5,851,828; 5,912,170; 6,004,811; 6,284,240; 6,392,013; 6,410,014; 6,753, 162; 8,211,422; and, PCT Publication WO9215322).

[0634] In general, CARs are comprised of an extracellular domain, a transmembrane domain, and an intracellular domain, wherein the extracellular domain comprises an antigen-binding domain that is specific for a predetermined target. While the antigen-binding domain of a CAR is often an antibody or antibody fragment (e.g., a single chain variable fragment, scFv), the binding domain is not particularly limited so long as it results in specific recognition of a target. For example, in an embodiment, the antigen-binding domain may comprise a receptor, such that the CAR is capable of binding to the ligand of the receptor. Alternatively, the antigen-binding domain may comprise a ligand, such that the CAR is capable of binding the endogenous receptor of that ligand.

[0635] The antigen-binding domain of a CAR is generally separated from the transmembrane domain by a hinge or spacer. The spacer is also not particularly limited, and it is designed to provide the CAR with flexibility. For example, a spacer domain may comprise a portion of a human Fc domain, including a portion of the CH3 domain, or the hinge region of any immunoglobulin, such as IgA, IgD, IgE, IgG, or IgM, or variants thereof. Furthermore, the hinge region may be modified so as to prevent off-target binding by FcRs or other potential interfering objects. For example, the hinge may comprise an IgG4 Fc domain with or without a S228P, L235E, and/or N297Q mutation (according to Kabat numbering) in order to decrease binding to FcRs. Additional spacers/hinges include, but are not limited to, CD4, CD8, and CD28 hinge regions.

[0636] The transmembrane domain of a CAR may be derived either from a natural or from a synthetic source. Where the source is natural, the domain may be derived from any membrane bound or transmembrane protein. Transmembrane regions of particular use in this disclosure may be derived from CD8, CD28, CD3, CD45, CD4, CD5, CDS, CD9, CD 16, CD22, CD33, CD37, CD64, CD80, CD86, CD 134, CD137, CD 154, TCR. Alternatively, the transmembrane domain may be synthetic, in which case it will comprise predominantly hydrophobic residues such as leucine and valine. Preferably a triplet of phenylalanine, tryptophan and valine will be found at each end of a synthetic transmembrane domain. Optionally, a short oligo- or polypeptide linker, preferably between 2 and 10 amino acids in length may form the linkage between the transmembrane domain and the cytoplasmic signaling domain of the CAR. A glycine-serine doublet provides a particularly suitable linker.

[0637] Alternative CAR constructs may be characterized as belonging to successive generations. First-generation CARs typically consist of a single-chain variable fragment of an antibody specific for an antigen, for example comprising a VL linked to a VH of a specific antibody, linked by a flexible linker, for example by a CD8a hinge domain and a CD8a transmembrane domain, to the transmembrane and intracellular signaling domains of either CD3ζ or FcRγ (scFv-CD3ζ or scFv-FcRγ; see U.S. Pat. Nos. 7,741,465; 5,912,172; 5,906,936). Second-generation CARs incorporate the intracellular domains of one or more costimulatory molecules, such as CD28, OX40 (CD134), or 4-1BB (CD137) within the endodomain (for example scFv-CD28/OX40/4-1BB-CD3ζ; see U.S. Pat. Nos. 8,911,993; 8,916,381; 8,975,071; 9,101,584; 9,102,760; 9,102,761). Third-generation CARs include a combination of costimulatory endodomains, such a CD3ζ-chain, CD97, GDI la-CD18, CD2, ICOS, CD27, CD154, CDS, OX40, 4-1BB, CD2, CD7, LIGHT, LFA-1, NKG2C, B7-H3, CD30, CD40, PD-1, or CD28 signaling domains (for example scFv-CD28-4-1BB-CD3ζ or scFv-CD28-OX40-CD3ζ; see U.S. Pat. Nos. 8,906,682; 8,399,645; 5,686,281; PCT Publication No. WO2014134165; PCT Publication No. WO2012079000). In an embodiment, the primary signaling domain comprises a functional signaling domain of a protein selected from the group consisting of CD3 zeta, CD3 gamma, CD3 delta, CD3 epsilon, common FcR gamma (FCERIG), FcR beta (Fc Epsilon R1b), CD79a, CD79b, Fc gamma RIIa, DAP10, and DAP12. In certain preferred embodiments, the primary signaling domain comprises a functional signaling domain of CD3ζ or FcRγ. In an embodiment, the one or more costimulatory signaling domains comprise a functional signaling domain of a protein selected, each independently, from the group consisting of: CD27, CD28, 4-1BB (CD137), OX40, CD30, CD40, PD-1, ICOS, lymphocyte function-associated antigen-1 (LFA-1), CD2, CD7, LIGHT, NKG2C, B7-H3, a ligand that specifically binds with CD83, CDS, ICAM-1, GITR, BAFFR, HVEM (LIGHTR), SLAMF7, NKp80 (KLRF1), CD160, CD19, CD4, CD8 alpha, CD8 beta, IL2R beta, IL2R gamma, IL7R alpha, ITGA4, VLA1, CD49a, ITGA4, IA4, CD49D, ITGA6, VLA-6, CD49f, ITGAD, CD11d, ITGAE, CD103, ITGAL, CD11a, LFA-1, ITGAM, CD11b, ITGAX, CD11c, ITGB1, CD29, ITGB2, CD18, ITGB7, TNFR2, TRANCE/RANKL, DNAM1 (CD226), SLAMF4 (CD244, 2B4), CD84, CD96 (Tactile), CEACAM1, CRTAM, Ly9 (CD229), CD160 (BY55), PSGL1, CD100 (SEMA4D), CD69, SLAMF6 (NTB-A, Ly108), SLAM (SLAMF1, CD150, IPO-3), BLAME (SLAMF8), SELPLG (CD162), LTBR, LAT, GADS, SLP-76, PAG/Cbp, NKp44, NKp30, NKp46, and NKG2D. In an embodiment, the one or more costimulatory signaling domains comprise a functional signaling domain of a protein selected, each independently, from the group consisting of: 4-1BB, CD27, and CD28. In an embodiment, a chimeric antigen receptor may have the design as described in U.S. Pat. No. 7,446,190, comprising an intracellular domain of CD35 chain (such as amino acid residues 52-163 of the human CD3 zeta chain, as shown in SEQ ID NO: 14 of U.S. Pat. No. 7,446,190), a signaling region from CD28 and an antigen-binding element (or portion or domain, such as scFv). The CD28 portion, when between the zeta chain portion and the antigen-binding element, may suitably include the transmembrane and signaling domains of CD28 (such as amino acid residues 114-220 of SEQ ID NO: 10, full sequence shown in SEQ ID NO: 6 of U.S. Pat. No. 7,446,190; these can include the following portion of CD28 as set forth in Genbank identifier NM_006139 (sequence version 1, 2 or 3): IEVMYPPPYLDNEKSNGTIIHVKGKHLCPSPLFPGPSKPFWVLVVVGGVLACYSLLVTVA FIIFWVRSKRSRLLHSDYMNMTPRRPGPTRKHYQPYAPPRDFAAYRS (SEQ ID NO: 138)). Alternatively, when the zeta sequence lies between the CD28 sequence and the antigen-binding element, intracellular domain of CD28 can be used alone (such as amino sequence set forth in SEQ ID NO: 9 of U.S. Pat. No. 7,446,190). Hence, certain embodiments employ a CAR comprising (a) a zeta chain portion comprising the intracellular domain of human CD35 chain, (b) a costimulatory signaling region, and (c) an antigen-binding element (or portion or domain), wherein the costimulatory signaling region comprises the amino acid sequence encoded by SEQ ID NO: 6 of U.S. Pat. No. 7,446,190.

[0638] Alternatively, co-stimulation may be orchestrated by expressing CARs in antigen-specific T cells, chosen so as to be activated and expanded following engagement of their native αβTCR, for example by antigen on professional antigen-presenting cells, with attendant co-stimulation. In addition, additional engineered receptors may be provided on the immuno-responsive cells, for example to improve targeting of a T-cell attack and/or minimize side effects.

[0639] By means of an example and without limitation, Kochenderfer et al., (2009) J Immunother. 32(7):689-702 described anti-CD19 chimeric antigen receptors (CAR). FMC63-28Z CAR contained a single chain variable region moiety (scFv) recognizing CD19 derived from the FMC63 mouse hybridoma (described in Nicholson et al., (1997) Molecular Immunology 34:1157-1165), a portion of the human CD28 molecule, and the intracellular component of the human

[0640] TCR-molecule. FMC63-CD828BBZ CAR contained the FMC63 scFv, the hinge and transmembrane regions of the CD8 molecule, the cytoplasmic portions of CD28 and 4-1BB, and the cytoplasmic component of the TCR-ζ molecule. The exact sequence of the CD28 molecule included in the FMC63-28Z CAR corresponded to Genbank identifier NM_006139; the sequence included all amino acids starting with the amino acid sequence IEVMYPPPY (SEQ ID NO: 139) and continuing all the way to the carboxy-terminus of the protein. To encode the anti-CD19 scFv component of the vector, the authors designed a DNA sequence which was based on a portion of a previously published CAR (Cooper et al., (2003) Blood 101:1637-1644). This sequence encoded the following components in frame from the 5′ end to the 3′ end: an XhoI site, the human granulocyte-macrophage colony-stimulating factor (GM-CSF) receptor α-chain signal sequence, the FMC63 light chain variable region (as in Nicholson et al., supra), a linker peptide (as in Cooper et al., supra), the FMC63 heavy chain variable region (as in Nicholson et al., supra), and a NotI site. A plasmid encoding this sequence was digested with XhoI and NotI. To form the MSGV-FMC63-28Z retroviral vector, the XhoI and NotI-digested fragment encoding the FMC63 scFv was ligated into a second XhoI and NotI-digested fragment that encoded the MSGV retroviral backbone (as in Hughes et al., (2005) Human Gene Therapy 16:457-472) as well as part of the extracellular portion of human CD28, the entire transmembrane and cytoplasmic portion of human CD28, and the cytoplasmic portion of the human TCR-ζ molecule (as in Maher et al., 2002) Nature Biotechnology 20: 70-75). The FMC63-28Z CAR is included in the KTE-C19 (axicabtagene ciloleucel) anti-CD19 CAR-T therapy product in development by Kite Pharma, Inc. for the treatment of inter alia patients with relapsed/refractory aggressive B-cell non-Hodgkin lymphoma (NHL). Accordingly, in an embodiment, cells intended for adoptive cell therapies, more particularly immuno-responsive cells such as T cells, may express the FMC63-28Z CAR as described by Kochenderfer et al. (supra). Hence, in an embodiment, cells intended for adoptive cell therapies, more particularly immuno-responsive cells such as T cells, may comprise a CAR comprising an extracellular antigen-binding element (or portion or domain, such as scFv) that specifically binds to an antigen, an intracellular signaling domain comprising an intracellular domain of a CD33 chain, and a costimulatory signaling region comprising a signaling domain of CD28. Preferably, the CD28 amino acid sequence is as set forth in Genbank identifier NM_006139 (sequence version 1, 2 or 3) starting with the amino acid sequence IEVMYPPPY (SEQ ID NO: 139) and continuing all the way to the carboxy terminus of the protein. The sequence is reproduced herein:

(SEQ ID NO: 138)
IEVMYPPPYLDNEKSNGTIIHVKGKHLCPSPLFPGPSKPFWVLVVVGGV
LACYSLLVTVAFIIFWVRSKRSRLLHSDYMNMTPRRPGPTRKHYQPYAP
PRDFAAYRS.

Preferably, the antigen is CD19, more preferably the antigen-binding element is an anti-CD19 scFv, even more preferably the anti-CD19 scFv as described by Kochenderfer et al. (supra).

[0641] Additional anti-CD19 CARs are further described in WO2015187528. More particularly Example 1 and Table 1 of WO2015187528, incorporated by reference herein, demonstrate the generation of anti-CD19 CARs based on a fully human anti-CD19 monoclonal antibody (47G4, as described in US20100104509) and murine anti-CD19 monoclonal antibody (as described in Nicholson et al. and explained above). Various combinations of a signal sequence (human CD8-alpha or GM-CSF receptor), extracellular and transmembrane regions (human CD8-alpha) and intracellular T-cell signaling domains (CD28-CD3ζ; 4-1BB-CD3ζ; CD27-CD3ζ; CD28-CD27-CD3ζ, 4-1BB-CD27-CD3ζ; CD27-4-1BB-CD3ζ; CD28-CD27-FcεRI gamma chain; or CD28-FcεRI gamma chain) were disclosed. Hence, in an embodiment, cells intended for adoptive cell therapies, more particularly immuno-responsive cells such as T cells, may comprise a CAR comprising an extracellular antigen-binding element that specifically binds to an antigen, an extracellular and transmembrane region as set forth in Table 1 of WO2015187528 and an intracellular T-cell signaling domain as set forth in Table 1 of WO2015187528. Preferably, the antigen is CD19, more preferably the antigen-binding element is an anti-CD19 scFv, even more preferably the mouse or human anti-CD19 scFv as described in Example 1 of WO2015187528. In an embodiment, the CAR comprises, consists essentially of or consists of an amino acid sequence of SEQ ID NO: 1, SEQ ID NO: 2, SEQ ID NO: 3, SEQ ID NO: 4, SEQ ID NO: 5, SEQ ID NO: 6, SEQ ID NO: 7, SEQ ID NO: 8, SEQ ID NO: 9, SEQ ID NO: 10, SEQ ID NO: 11, SEQ ID NO: 12, or SEQ ID NO: 13 as set forth in Table 1 of WO2015187528.

[0642] By means of an example and without limitation, chimeric antigen receptor that recognizes the CD70 antigen is described in WO2012058460A2 (see also, Park et al., CD70 as a target for chimeric antigen receptor T cells in head and neck squamous cell carcinoma, Oral Oncol. 2018 March; 78:145-150; and Jin et al., CD70, a novel target of CAR T-cell therapy for gliomas, Neuro Oncol. 2018 Jan. 10; 20(1):55-65). CD70 is expressed by diffuse large B-cell and follicular lymphoma and also by the malignant cells of Hodgkins lymphoma, Waldenstrom's macroglobulinemia and multiple myeloma, and by HTLV-1- and EBV-associated malignancies. (Agathanggelou et al. Am. J. Pathol. 1995; 147:1152-1160; Hunter et al., Blood 2004; 104:4881. 26; Lens et al., J Immunol. 2005; 174:6212-6219; Baba et al., J Virol. 2008; 82:3843-3852.) In addition, CD70 is expressed by non-hematological malignancies such as renal cell carcinoma and glioblastoma. (Junker et al., J Urol. 2005; 173:2150-2153; Chahlavi et al., Cancer Res 2005; 65:5428-5438) Physiologically, CD70 expression is transient and restricted to a subset of highly activated T, B, and dendritic cells.

[0643] By means of an example and without limitation, chimeric antigen receptor that recognizes BCMA has been described (see, e.g., US20160046724A1; WO2016014789A2; WO2017211900A1; WO2015158671A1; US20180085444A1; WO2018028647A1; US20170283504A1; and WO2013154760A1).

[0644] In an embodiment, the immune cell may, in addition to a CAR or exogenous TCR as described herein, further comprise a chimeric inhibitory receptor (inhibitory CAR) that specifically binds to a second target antigen and is capable of inducing an inhibitory or immunosuppressive or repressive signal to the cell upon recognition of the second target antigen. In an embodiment, the chimeric inhibitory receptor comprises an extracellular antigen-binding element (or portion or domain) configured to specifically bind to a target antigen, a transmembrane domain, and an intracellular immunosuppressive or repressive signaling domain. In an embodiment, the second target antigen is an antigen that is not expressed on the surface of a cancer cell or infected cell or the expression of which is downregulated on a cancer cell or an infected cell. In an embodiment, the second target antigen is an MHC-class I molecule. In an embodiment, the intracellular signaling domain comprises a functional signaling portion of an immune checkpoint molecule, such as for example PD-1 or CTLA4. Advantageously, the inclusion of such inhibitory CAR reduces the chance of the engineered immune cells attacking non-target (e.g., non-cancer) tissues.

[0645] Alternatively, T-cells expressing CARs may be further modified to reduce or eliminate expression of endogenous TCRs in order to reduce off-target effects. Reduction or elimination of endogenous TCRs can reduce off-target effects and increase the effectiveness of the T cells (U.S. Pat. No. 9,181,527). T cells stably lacking expression of a functional TCR may be produced using a variety of approaches. T cells internalize, sort, and degrade the entire T cell receptor as a complex, with a half-life of about 10 hours in resting T cells and 3 hours in stimulated T cells (von Essen, M. et al. 2004. J. Immunol. 173:384-393). Proper functioning of the TCR complex requires the proper stoichiometric ratio of the proteins that compose the TCR complex. TCR function also requires two functioning TCR zeta proteins with ITAM motifs. The activation of the TCR upon engagement of its MHC-peptide ligand requires the engagement of several TCRs on the same T cell, which all must signal properly. Thus, if a TCR complex is destabilized with proteins that do not associate properly or cannot signal optimally, the T cell will not become activated sufficiently to begin a cellular response.

[0646] Accordingly, in an embodiment, TCR expression may eliminated using RNA interference (e.g., shRNA, siRNA, miRNA, etc.), CRISPR, or other methods that target the nucleic acids encoding specific TCRs (e.g., TCR-α and TCR-β) and/or CD3 chains in primary T cells. By blocking expression of one or more of these proteins, the T cell will no longer produce one or more of the key components of the TCR complex, thereby destabilizing the TCR complex and preventing cell surface expression of a functional TCR.

[0647] In some instances, CAR may also comprise a switch mechanism for controlling expression and/or activation of the CAR. For example, a CAR may comprise an extracellular, transmembrane, and intracellular domain, in which the extracellular domain comprises a target-specific binding element that comprises a label, binding domain, or tag that is specific for a molecule other than the target antigen that is expressed on or by a target cell. In such embodiments, the specificity of the CAR is provided by a second construct that comprises a target antigen binding domain (e.g., an scFv or a bispecific antibody that is specific for both the target antigen and the label or tag on the CAR) and a domain that is recognized by or binds to the label, binding domain, or tag on the CAR. See, e.g., WO 2013/044225, WO 2016/000304, WO 2015/057834, WO 2015/057852, WO 2016/070061, U.S. Pat. No. 9,233,125, US 2016/0129109. In this way, a T-cell that expresses the CAR can be administered to a subject, but the CAR cannot bind its target antigen until the second composition comprising an antigen-specific binding domain is administered.

[0648] Alternative switch mechanisms include CARs that require multimerization in order to activate their signaling function (see, e.g., US 2015/0368342, US 2016/0175359, US 2015/0368360) and/or an exogenous signal, such as a small molecule drug (US 2016/0166613, Yung et al., Science, 2015), in order to elicit a T-cell response. Some CARs may also comprise a “suicide switch” to induce cell death of the CAR T-cells following treatment (Buddee et al., PLOS One, 2013) or to downregulate expression of the CAR following binding to the target antigen (WO 2016/011210).

[0649] Alternative techniques may be used to transform target immuno-responsive cells, such as protoplast fusion, lipofection, transfection or electroporation. A wide variety of vectors may be used, such as retroviral vectors, lentiviral vectors, adenoviral vectors, adeno-associated viral vectors, plasmids or transposons, such as a Sleeping Beauty transposon (see U.S. Pat. Nos. 6,489,458; 7,148,203; 7,160,682; 7,985,739; 8,227,432), may be used to introduce CARs, for example using 2^{nd} generation antigen-specific CARs signaling through CD35 and either CD28 or CD137. Viral vectors may for example include vectors based on HIV, SV40, EBV, HSV or BPV.

[0650] Cells that are targeted for transformation may for example include T cells, Natural Killer (NK) cells, cytotoxic T lymphocytes (CTL), regulatory T cells, human embryonic stem cells, tumor-infiltrating lymphocytes (TIL) or a pluripotent stem cell from which lymphoid cells may be differentiated. T cells expressing a desired CAR may for example be selected through co-culture with γ-irradiated activating and propagating cells (AaPC), which co-express the cancer antigen and co-stimulatory molecules. The engineered CAR T-cells may be expanded, for example by co-culture on AaPC in presence of soluble factors, such as IL-2 and IL-21. This expansion may for example be carried out so as to provide memory CAR+ T cells (which may for example be assayed by non-enzymatic digital array and/or multi-panel flow cytometry). In this way, CAR T cells may be provided that have specific cytotoxic activity against antigen-bearing tumors (optionally in conjunction with production of desired chemokines such as interferon-γ). CAR T cells of this kind may for example be used in animal models, for example to treat tumor xenografts.

[0651] In an embodiment, ACT includes co-transferring CD4+ Th1 cells and CD8+ CTLs to induce a synergistic antitumur response (see, e.g., Li et al., Adoptive cell therapy with CD4+ T helper 1 cells and CD8+ cytotoxic T cells enhances complete rejection of an established tumour, leading to generation of endogenous memory responses to non-targeted tumur epitopes. Clin Transl Immunology. 2017 October; 6 (10):e160).

[0652] In an embodiment, Th17 cells are transferred to a subject in need thereof. Th17 cells have been reported to directly eradicate melanoma tumors in mice to a greater extent than Th1 cells (Muranski P, et al., Tumor-specific Th17-polarized cells eradicate large established melanoma. Blood. 2008 Jul. 15; 112(2):362-73; and Martin-Orozco N, et al., T helper 17 cells promote cytotoxic T cell activation in tumor immunity. Immunity. 2009 Nov. 20; 31(5):787-98). Those studies involved an adoptive T cell transfer (ACT) therapy approach, which takes advantage of CD4+ T cells that express a TCR recognizing tyrosinase tumor antigen. Exploitation of the TCR leads to rapid expansion of Th17 populations to large numbers ex vivo for reinfusion into the autologous tumor-bearing hosts.

[0653] In an embodiment, ACT may include autologous iPSC-based vaccines, such as irradiated iPSCs in autologous anti-tumor vaccines (see e.g., Kooreman, Nigel G. et al., Autologous iPSC-Based Vaccines Elicit Anti-tumor Responses In Vivo, Cell Stem Cell 22, 1-13, 2018, doi.org/10.1016/j.stem.2018.01.016).

[0654] Unlike T-cell receptors (TCRs) that are MHC restricted, CARs can potentially bind any cell surface-expressed antigen and can thus be more universally used to treat patients (see Irving et al., Engineering Chimeric Antigen Receptor T-Cells for Racing in Solid Tumors: Don't Forget the Fuel, Front. Immunol., 3 Apr. 2017, doi.org/10.3389/fimmu.2017.00267). In an embodiment, in the absence of endogenous T-cell infiltrate (e.g., due to aberrant antigen processing and presentation), which precludes the use of TIL therapy and immune checkpoint blockade, the transfer of CAR T-cells may be used to treat patients (see, e.g., Hinrichs C S, Rosenberg S A. Exploiting the curative potential of adoptive T-cell therapy for cancer. Immunol Rev (2014) 257(1):56-71. doi: 10.1111/imr.12132).

[0655] Approaches such as the foregoing may be adapted to provide methods of treating and/or increasing survival of a subject having a disease, such as a neoplasia, for example by administering an effective amount of an immuno-responsive cell comprising an antigen recognizing receptor that binds a selected antigen, wherein the binding activates the immuno-responsive cell, thereby treating or preventing the disease (such as a neoplasia, a pathogen infection, an autoimmune disorder, or an allogeneic transplant reaction).

[0656] In an embodiment, the treatment can be administered after lymphodepleting pretreatment in the form of chemotherapy (typically a combination of cyclophosphamide and fludarabine) or radiation therapy. Initial studies in ACT had short lived responses and the transferred cells did not persist in vivo for very long (Houot et al., T-cell-based immunotherapy: adoptive cell transfer and checkpoint inhibition. Cancer Immunol Res (2015) 3 (10):1115-22; and Kamta et al., Advancing Cancer Therapy with Present and Emerging Immuno-Oncology Approaches. Front. Oncol. (2017) 7:64). Immune suppressor cells like Tregs and MDSCs may attenuate the activity of transferred cells by outcompeting them for the necessary cytokines. Not being bound by a theory lymphodepleting pretreatment may eliminate the suppressor cells allowing the TILs to persist.

[0657] In one embodiment, the treatment can be administrated into patients undergoing an immunosuppressive treatment (e.g., glucocorticoid treatment). The cells or population of cells may be made resistant to at least one immunosuppressive agent due to the inactivation of a gene encoding a receptor for such immunosuppressive agent. In an embodiment, the immunosuppressive treatment provides for the selection and expansion of the immuno-responsive T cells within the patient.

[0658] In an embodiment, the treatment can be administered before primary treatment (e.g., surgery or radiation therapy) to shrink a tumor before the primary treatment. In another embodiment, the treatment can be administered after primary treatment to remove any remaining cancer cells.

[0659] In an embodiment, immuno-metabolic barriers can be targeted therapeutically prior to and/or during ACT to enhance responses to ACT or CAR T-cell therapy and to support endogenous immunity (see, e.g., Irving et al., Engineering Chimeric Antigen Receptor T-Cells for Racing in Solid Tumors: Don't Forget the Fuel, Front. Immunol., 3 Apr. 2017, doi.org/10.3389/fimmu.2017.00267).

[0660] The administration of cells or population of cells, such as immune system cells or cell populations, such as more particularly immuno-responsive cells or cell populations, as disclosed herein may be carried out in any convenient manner, including by aerosol inhalation, injection, ingestion, transfusion, implantation or transplantation. The cells or population of cells may be administered to a patient subcutaneously, intradermally, intratumorally, intranodally, intramedullary, intramuscularly, intrathecally, by intravenous or intralymphatic injection, or intraperitoneally. In an embodiment, the disclosed CARs may be delivered or administered into a cavity formed by the resection of tumor tissue (i.e., intracavity delivery) or directly into a tumor prior to resection (i.e., intratumoral delivery). In one embodiment, the cell compositions of the present invention are preferably administered by intravenous injection.

[0661] The administration of the cells or population of cells can consist of the administration of 104-109 cells per kg body weight, preferably 105 to 106 cells/kg body weight including all integer values of cell numbers within those ranges. Dosing in CAR T cell therapies may for example involve administration of from 106 to 109 cells/kg, with or without a course of lymphodepletion, for example with cyclophosphamide. The cells or population of cells can be administrated in one or more doses. In another embodiment, the effective amount of cells are administrated as a single dose. In another embodiment, the effective amount of cells are administrated as more than one dose over a period time. Timing of administration is within the judgment of managing physician and depends on the clinical condition of the patient. The cells or population of cells may be obtained from any source, such as a blood bank or a donor. While individual needs vary, determination of optimal ranges of effective amounts of a given cell type for a particular disease or conditions are within the skill of one in the art. An effective amount means an amount which provides a therapeutic or prophylactic benefit. The dosage administrated will be dependent upon the age, health and weight of the recipient, kind of concurrent treatment, if any, frequency of treatment and the nature of the effect desired.

[0662] In another embodiment, the effective amount of cells or composition comprising those cells are administrated parenterally. The administration can be an intravenous administration. The administration can be directly done by injection within a tumor.

[0663] To guard against possible adverse reactions, engineered immuno-responsive cells may be equipped with a transgenic safety switch, in the form of a transgene that renders the cells vulnerable to exposure to a specific signal. For example, the herpes simplex viral thymidine kinase (TK) gene may be used in this way, for example by introduction into allogeneic T lymphocytes used as donor lymphocyte infusions following stem cell transplantation (Greco, et al., Improving the safety of cell therapy with the TK-suicide gene. Front. Pharmacol. 2015; 6:95). In such cells, administration of a nucleoside prodrug such as ganciclovir or acyclovir causes cell death. Alternative safety switch constructs include inducible caspase 9, for example triggered by administration of a small-molecule-dimerizer that brings together two nonfunctional icasp9 molecules to form the active enzyme. A wide variety of alternative approaches to implementing cellular proliferation controls have been described (see U.S. Patent Publication No. 20130071414; PCT Patent Publication WO2011146862; PCT Patent Publication WO2014011987; PCT Patent Publication WO2013040371; Zhou et al. BLOOD, 2014, 123/25:3895-3905; Di Stasi et al., The New England Journal of Medicine 2011; 365:1673-1683; Sadelain M, The New England Journal of Medicine 2011; 365:1735-173; Ramos et al., Stem Cells 28(6):1107-15 (2010)).

[0664] In a further refinement of adoptive therapies, genome editing may be used to tailor immuno-responsive cells to alternative implementations, for example providing edited CAR T cells (see Poirot et al., 2015, Multiplex genome edited T-cell manufacturing platform for “off-the-shelf” adoptive T-cell immunotherapies, Cancer Res 75 (18):3853; Ren et al., 2017, Multiplex genome editing to generate universal CAR T cells resistant to PD1 inhibition, Clin Cancer Res. 2017 May 1; 23(9):2255-2266. doi: 10.1158/1078-0432.CCR-16-1300. Epub 2016 Nov. 4; Qasim et al., 2017, Molecular remission of infant B-ALL after infusion of universal TALEN gene-edited CAR T cells, Sci Transl Med. 2017 Jan. 25; 9 (374); Legut, et al., 2018, CRISPR-mediated TCR replacement generates superior anticancer transgenic T cells. Blood, 131(3), 311-322; and Georgiadis et al., Long Terminal Repeat CRISPR-CAR-Coupled “Universal” T Cells Mediate Potent Anti-leukemic Effects, Molecular Therapy, In Press, Corrected Proof, Available online 6 Mar. 2018). Cells may be edited using any CRISPR system and method of use thereof as described herein. The composition and systems may be delivered to an immune cell by any method described herein. In preferred embodiments, cells are edited ex vivo and transferred to a subject in need thereof. Immuno-responsive cells, CAR T cells or any cells used for adoptive cell transfer may be edited. Editing may be performed for example to insert or knock-in an exogenous gene, such as an exogenous gene encoding a CAR or a TCR, at a preselected locus in a cell (e.g., TRAC locus); to eliminate potential alloreactive T-cell receptors (TCR) or to prevent inappropriate pairing between endogenous and exogenous TCR chains, such as to knock-out or knock-down expression of an endogenous TCR in a cell; to disrupt the target of a chemotherapeutic agent in a cell; to block an immune checkpoint, such as to knock-out or knock-down expression of an immune checkpoint protein or receptor in a cell; to knock-out or knock-down expression of other gene or genes in a cell, the reduced expression or lack of expression of which can enhance the efficacy of adoptive therapies using the cell; to knock-out or knock-down expression of an endogenous gene in a cell, said endogenous gene encoding an antigen targeted by an exogenous CAR or TCR; to knock-out or knock-down expression of one or more MHC constituent proteins in a cell; to activate a T cell; to modulate cells such that the cells are resistant to exhaustion or dysfunction; and/or increase the differentiation and/or proliferation of functionally exhausted or dysfunctional CD8+ T-cells (see PCT Patent Publications: WO2013176915, WO2014059173, WO2014172606, WO2014184744, and WO2014191128).

[0665] In an embodiment, editing may result in inactivation of a gene. By inactivating a gene, it is intended that the gene of interest is not expressed in a functional protein form. In a particular embodiment, the system specifically catalyzes cleavage in one targeted gene thereby inactivating said targeted gene. The nucleic acid strand breaks caused are commonly repaired through the distinct mechanisms of homologous recombination or non-homologous end joining (NHEJ). However, NHEJ is an imperfect repair process that often results in changes to the DNA sequence at the site of the cleavage. Repair via non-homologous end joining (NHEJ) often results in small insertions or deletions (Indel) and can be used for the creation of specific gene knockouts. Cells in which a cleavage induced mutagenesis event has occurred can be identified and/or selected by well-known methods in the art. In an embodiment, homology directed repair (HDR) is used to concurrently inactivate a gene (e.g., TRAC) and insert an endogenous TCR or CAR into the inactivated locus.

[0666] Hence, in an embodiment, editing of cells, particularly cells intended for adoptive cell therapies, more particularly immuno-responsive cells such as T cells, may be performed to insert or knock-in an exogenous gene, such as an exogenous gene encoding a CAR or a TCR, at a preselected locus in a cell. Conventionally, nucleic acid molecules encoding CARs or TCRs are transfected or transduced to cells using randomly integrating vectors, which, depending on the site of integration, may lead to clonal expansion, oncogenic transformation, variegated transgene expression and/or transcriptional silencing of the transgene. Directing of transgene(s) to a specific locus in a cell can minimize or avoid such risks and advantageously provide for uniform expression of the transgene(s) by the cells. Without limitation, suitable ‘safe harbor’ loci for directed transgene integration include CCR5 or AAVS1. Homology-directed repair (HDR) strategies are known and described elsewhere in this specification allowing to insert transgenes into desired loci (e.g., TRAC locus).

[0667] Further suitable loci for insertion of transgenes, in particular CAR or exogenous TCR transgenes, include without limitation loci comprising genes coding for constituents of endogenous T-cell receptor, such as T-cell receptor alpha locus (TRA) or T-cell receptor beta locus (TRB), for example T-cell receptor alpha constant (TRAC) locus, T-cell receptor beta constant 1 (TRBC1) locus or T-cell receptor beta constant 2 (TRBC1) locus. Advantageously, insertion of a transgene into such locus can simultaneously achieve expression of the transgene, potentially controlled by the endogenous promoter, and knock-out expression of the endogenous TCR. This approach has been exemplified in Eyquem et al., (2017) Nature 543:113-117, wherein the authors used CRISPR/Cas9 gene editing to knock-in a DNA molecule encoding a CD19-specific CAR into the TRAC locus downstream of the endogenous promoter; the CAR-T cells obtained by CRISPR were significantly superior in terms of reduced tonic CAR signaling and exhaustion.

[0668] T cell receptors (TCR) are cell surface receptors that participate in the activation of T cells in response to the presentation of antigen. The TCR is generally made from two chains, a and B, which assemble to form a heterodimer and associates with the CD3-transducing subunits to form the T cell receptor complex present on the cell surface. Each a and B chain of the TCR consists of an immunoglobulin-like N-terminal variable (V) and constant (C) region, a hydrophobic transmembrane domain, and a short cytoplasmic region. As for immunoglobulin molecules, the variable region of the α and β chains are generated by V(D)J recombination, creating a large diversity of antigen specificities within the population of T cells. However, in contrast to immunoglobulins that recognize intact antigen, T cells are activated by processed peptide fragments in association with an MHC molecule, introducing an extra dimension to antigen recognition by T cells, known as MHC restriction. Recognition of MHC disparities between the donor and recipient through the T cell receptor leads to T cell proliferation and the potential development of graft versus host disease (GVHD). The inactivation of TCRα or TCRβ can result in the elimination of the TCR from the surface of T cells preventing recognition of alloantigen and thus GVHD. However, TCR disruption generally results in the elimination of the CD3 signaling component and alters the means of further T cell expansion.

[0669] Hence, in an embodiment, editing of cells, particularly cells intended for adoptive cell therapies, more particularly immuno-responsive cells such as T cells, may be performed to knock-out or knock-down expression of an endogenous TCR in a cell. For example, NHEJ-based or HDR-based gene editing approaches can be employed to disrupt the endogenous TCR alpha and/or beta chain genes. For example, gene editing system or systems, such as CRISPR/Cas system or systems, can be designed to target a sequence found within the TCR beta chain conserved between the beta 1 and beta 2 constant region genes (TRBC1 and TRBC2) and/or to target the constant region of the TCR alpha chain (TRAC) gene.

[0670] Allogeneic cells are rapidly rejected by the host immune system. It has been demonstrated that, allogeneic leukocytes present in non-irradiated blood products will persist for no more than 5 to 6 days (Boni, Muranski et al. 2008 Blood 1; 112(12):4746-54). Thus, to prevent rejection of allogeneic cells, the host's immune system usually has to be suppressed to some extent. However, in the case of adoptive cell transfer the use of immunosuppressive drugs also have a detrimental effect on the introduced therapeutic T cells. Therefore, to effectively use an adoptive immunotherapy approach in these conditions, the introduced cells would need to be resistant to the immunosuppressive treatment. Thus, in a particular embodiment, the present invention further comprises a step of modifying T cells to make them resistant to an immunosuppressive agent, preferably by inactivating at least one gene encoding a target for an immunosuppressive agent. An immunosuppressive agent is an agent that suppresses immune function by one of several mechanisms of action. An immunosuppressive agent can be, but is not limited to a calcineurin inhibitor, a target of rapamycin, an interleukin-2 receptor α-chain blocker, an inhibitor of inosine monophosphate dehydrogenase, an inhibitor of dihydrofolic acid reductase, a corticosteroid or an immunosuppressive antimetabolite. The present invention allows conferring immunosuppressive resistance to T cells for immunotherapy by inactivating the target of the immunosuppressive agent in T cells. As non-limiting examples, targets for an immunosuppressive agent can be a receptor for an immunosuppressive agent such as: CD52, glucocorticoid receptor (GR), a FKBP family gene member and a cyclophilin family gene member.

[0671] In an embodiment, editing of cells, particularly cells intended for adoptive cell therapies, more particularly immuno-responsive cells such as T cells, may be performed to block an immune checkpoint, such as to knock-out or knock-down expression of an immune checkpoint protein or receptor in a cell. Immune checkpoints are inhibitory pathways that slow down or stop immune reactions and prevent excessive tissue damage from uncontrolled activity of immune cells. In an embodiment, the immune checkpoint targeted is the programmed death-1 (PD-1 or CD279) gene (PDCD1). In other embodiments, the immune checkpoint targeted is cytotoxic T-lymphocyte-associated antigen (CTLA-4). In additional embodiments, the immune checkpoint targeted is another member of the CD28 and CTLA4 Ig superfamily such as BTLA, LAG3, ICOS, PDL1 or KIR. In further additional embodiments, the immune checkpoint targeted is a member of the TNFR superfamily such as CD40, OX40, CD137, GITR, CD27 or TIM-3.

[0672] Additional immune checkpoints include Src homology 2 domain-containing protein tyrosine phosphatase 1 (SHP-1) (Watson H A, et al., SHP-1: the next checkpoint target for cancer immunotherapy? Biochem Soc Trans. 2016 Apr. 15; 44(2):356-62). SHP-1 is a widely expressed inhibitory protein tyrosine phosphatase (PTP). In T-cells, it is a negative regulator of antigen-dependent activation and proliferation. It is a cytosolic protein, and therefore not amenable to antibody-mediated therapies, but its role in activation and proliferation makes it an attractive target for genetic manipulation in adoptive transfer strategies, such as chimeric antigen receptor (CAR) T cells. Immune checkpoints may also include T cell immunoreceptor with Ig and ITIM domains (TIGIT/Vstm3/WUCAM/VSIG9) and VISTA (Le Mercier I, et al., (2015) Beyond CTLA-4 and PD-1, the generation Z of negative checkpoint regulators. Front. Immunol. 6:418).

[0673] International Patent Publication No. WO2014172606 relates to the use of MT1 and/or MT2 inhibitors to increase proliferation and/or activity of exhausted CD8+ T-cells and to decrease CD8+ T-cell exhaustion (e.g., decrease functionally exhausted or unresponsive CD8+ immune cells). In an embodiment, metallothioneins are targeted by gene editing in adoptively transferred T cells.

[0674] In an embodiment, targets of gene editing may be at least one targeted locus involved in the expression of an immune checkpoint protein. Such targets may include, but are not limited to CTLA4, PPP2CA, PPP2CB, PTPN6, PTPN22, PDCD1, ICOS (CD278), PDL1, KIR, LAG3, HAVCR2, BTLA, CD160, TIGIT, CD96, CRTAM, LAIR1, SIGLEC7, SIGLEC9, CD244 (2B4), TNFRSF10B, TNFRSF10A, CASP8, CASP10, CASP3, CASP6, CASP7, FADD, FAS, TGFBRII, TGFRBRI, SMAD2, SMAD3, SMAD4, SMAD10, SKI, SKIL, TGIF1, IL10RA, IL10RB, HMOX2, IL6R, IL6ST, EIF2AK4, CSK, PAG1, SIT1, FOXP3, PRDM1, BATF, VISTA, GUCY1A2, GUCY1A3, GUCY1B2, GUCY1B3, MTI, MT2, CD40, OX40, CD137, GITR, CD27, SHP-1, TIM-3, CEACAM-1, CEACAM-3, or CEACAM-5. In preferred embodiments, the gene locus involved in the expression of PD-1 or CTLA-4 genes is targeted. In other preferred embodiments, combinations of genes are targeted, such as, but not limited to, PD-1 and TIGIT.

[0675] By means of an example and without limitation, WO2016196388 concerns an engineered T cell comprising (a) a genetically engineered antigen receptor that specifically binds to an antigen, which receptor may be a CAR; and (b) a disrupted gene encoding a PD-L1, an agent for disruption of a gene encoding a PD-L1, and/or disruption of a gene encoding PD-L1, wherein the disruption of the gene may be mediated by a gene editing nuclease, a zinc finger nuclease (ZFN), CRISPR/Cas9 and/or TALEN. WO2015142675 relates to immune effector cells comprising a CAR in combination with an agent (such as the composition or system herein) that increases the efficacy of the immune effector cells in the treatment of cancer, wherein the agent may inhibit an immune inhibitory molecule, such as PD1, PD-L1, CTLA-4, TIM-3, LAG-3, VISTA, BTLA, TIGIT, LAIR1, CD160, 2B4, TGFR beta, CEACAM-1, CEACAM-3, or CEACAM-5. Ren et al., (2017) Clin Cancer Res 23 (9) 2255-2266 performed lentiviral delivery of CAR and electro-transfer of Cas9 mRNA and gRNAs targeting endogenous TCR, β-2 microglobulin (B2M) and PD1 simultaneously, to generate gene-disrupted allogeneic CAR T cells deficient of TCR, HLA class I molecule and PD1.

[0676] In an embodiment, cells may be engineered to express a CAR, wherein expression and/or function of methylcytosine dioxygenase genes (TET1, TET2 and/or TET3) in the cells has been reduced or eliminated, (such as the composition or system herein) (for example, as described in WO201704916).

[0677] In an embodiment, editing of cells, particularly cells intended for adoptive cell therapies, more particularly immuno-responsive cells such as T cells, may be performed to knock-out or knock-down expression of an endogenous gene in a cell, said endogenous gene encoding an antigen targeted by an exogenous CAR or TCR, thereby reducing the likelihood of targeting of the engineered cells. In an embodiment, the targeted antigen may be one or more antigen selected from the group consisting of CD38, CD138, CS-1, CD33, CD26, CD30, CD53, CD92, CD100, CD148, CD150, CD200, CD261, CD262, CD362, human telomerase reverse transcriptase (hTERT), survivin, mouse double minute 2 homolog (MDM2), cytochrome P450 1B1 (CYP1B), HER2/neu, Wilms' tumor gene 1 (WT1), livin, alphafetoprotein (AFP), carcinoembryonic antigen (CEA), mucin 16 (MUC16), MUC1, prostate-specific membrane antigen (PSMA), p53, cyclin (D1), B cell maturation antigen (BCMA), transmembrane activator and CAML Interactor (TACI), and B-cell activating factor receptor (BAFF-R) (for example, as described in WO2016011210 and WO2017011804).

[0678] In an embodiment, editing of cells, particularly cells intended for adoptive cell therapies, more particularly immuno-responsive cells such as T cells, may be performed to knock-out or knock-down expression of one or more MHC constituent proteins, such as one or more HLA proteins and/or beta-2 microglobulin (B2M), in a cell, whereby rejection of non-autologous (e.g., allogeneic) cells by the recipient's immune system can be reduced or avoided. In preferred embodiments, one or more HLA class I proteins, such as HLA-A, B and/or C, and/or B2M may be knocked-out or knocked-down. Preferably, B2M may be knocked-out or knocked-down. By means of an example, Ren et al., (2017) Clin Cancer Res 23 (9) 2255-2266 performed lentiviral delivery of CAR and electro-transfer of Cas9 mRNA and gRNAs targeting endogenous TCR, β-2 microglobulin (B2M) and PD1 simultaneously, to generate gene-disrupted allogeneic CAR T cells deficient of TCR, HLA class I molecule and PD1.

[0679] In other embodiments, at least two genes are edited. Pairs of genes may include, but are not limited to PD1 and TCRα, PD1 and TCRβ, CTLA-4 and TCRα, CTLA-4 and TCRβ, LAG3 and TCRα, LAG3 and TCRβ, Tim3 and TCRα, Tim3 and TCRβ, BTLA and TCRα, BTLA and TCRβ, BY55 and TCRα, BY55 and TCRβ, TIGIT and TCRα, TIGIT and TCRβ, B7H5 and TCRα, B7H5 and TCRβ, LAIR1 and TCRα, LAIR1 and TCRβ, SIGLEC10 and TCRα, SIGLEC10 and TCRβ, 2B4 and TCRα, 2B4 and TCRβ, B2M and TCRα, B2M and TCRβ.

[0680] In an embodiment, a cell may be multiplied edited (multiplex genome editing) as taught herein to (1) knock-out or knock-down expression of an endogenous TCR (for example, TRBC1, TRBC2 and/or TRAC), (2) knock-out or knock-down expression of an immune checkpoint protein or receptor (for example PD1, PD-L1 and/or CTLA4); and (3) knock-out or knock-down expression of one or more MHC constituent proteins (for example, HLA-A, B and/or C, and/or B2M, preferably B2M).

[0681] Whether prior to or after genetic modification of the T cells, the T cells can be activated and expanded generally using methods as described, for example, in U.S. Pat. Nos. 6,352,694; 6,534,055; 6,905,680; 5,858,358; 6,887,466; 6,905,681; 7,144,575; 7,232,566; 7,175,843; 5,883,223; 6,905,874; 6,797,514; 6,867,041; and 7,572,631. T cells can be expanded in vitro or in vivo.

[0682] Immune cells may be obtained using any method known in the art. In one embodiment, allogenic T cells may be obtained from healthy subjects. In one embodiment T cells that have infiltrated a tumor are isolated. T cells may be removed during surgery. T cells may be isolated after removal of tumor tissue by biopsy. T cells may be isolated by any means known in the art. In one embodiment, T cells are obtained by apheresis. In one embodiment, the method may comprise obtaining a bulk population of T cells from a tumor sample by any suitable method known in the art. For example, a bulk population of T cells can be obtained from a tumor sample by dissociating the tumor sample into a cell suspension from which specific cell populations can be selected. Suitable methods of obtaining a bulk population of T cells may include, but are not limited to, any one or more of mechanically dissociating (e.g., mincing) the tumor, enzymatically dissociating (e.g., digesting) the tumor, and aspiration (e.g., as with a needle).

[0683] The bulk population of T cells obtained from a tumor sample may comprise any suitable type of T cell. Preferably, the bulk population of T cells obtained from a tumor sample comprises tumor infiltrating lymphocytes (TILs).

[0684] The tumor sample may be obtained from any mammal. Unless stated otherwise, as used herein, the term “mammal” refers to any mammal including, but not limited to, mammals of the order Logomorpha, such as rabbits; the order Carnivora, including Felines (cats) and Canines (dogs); the order Artiodactyla, including Bovines (cows) and Swines (pigs); or of the order Perssodactyla, including Equines (horses). The mammals may be non-human primates, e.g., of the order Primates, Ceboids, or Simoids (monkeys) or of the order Anthropoids (humans and apes). In an embodiment, the mammal may be a mammal of the order Rodentia, such as mice and hamsters. Preferably, the mammal is a non-human primate or a human. An especially preferred mammal is the human.

[0685] T cells can be obtained from a number of sources, including peripheral blood mononuclear cells (PBMC), bone marrow, lymph node tissue, spleen tissue, and tumors. In an embodiment of the present invention, T cells can be obtained from a unit of blood collected from a subject using any number of techniques known to the skilled artisan, such as Ficoll separation. In one preferred embodiment, cells from the circulating blood of an individual are obtained by apheresis or leukapheresis. The apheresis product typically contains lymphocytes, including T cells, monocytes, granulocytes, B cells, other nucleated white blood cells, red blood cells, and platelets. In one embodiment, the cells collected by apheresis may be washed to remove the plasma fraction and to place the cells in an appropriate buffer or media for subsequent processing steps. In one embodiment of the invention, the cells are washed with phosphate buffered saline (PBS). In an alternative embodiment, the wash solution lacks calcium and may lack magnesium or may lack many if not all divalent cations. Initial activation steps in the absence of calcium lead to magnified activation. As those of ordinary skill in the art would readily appreciate a washing step may be accomplished by methods known to those in the art, such as by using a semi-automated “flow-through” centrifuge (for example, the Cobe 2991 cell processor) according to the manufacturer's instructions. After washing, the cells may be resuspended in a variety of biocompatible buffers, such as, for example, Ca-free, Mg-free PBS. Alternatively, the undesirable components of the apheresis sample may be removed, and the cells directly resuspended in culture media.

[0686] In another embodiment, T cells are isolated from peripheral blood lymphocytes by lysing the red blood cells and depleting the monocytes, for example, by centrifugation through a PERCOLL™ gradient. A specific subpopulation of T cells, such as CD28+, CD4+, CDC, CD45RA+, and CD45RO+ T cells, can be further isolated by positive or negative selection techniques. For example, in one preferred embodiment, T cells are isolated by incubation with anti-CD3/anti-CD28 (i.e., 3×28)-conjugated beads, such as DYNABEADS® M-450 CD3/CD28 T, or XCYTE DYNABEADS™ for a time period sufficient for positive selection of the desired T cells. In one embodiment, the time period is about 30 minutes. In a further embodiment, the time period ranges from 30 minutes to 36 hours or longer and all integer values there between. In a further embodiment, the time period is at least 1, 2, 3, 4, 5, or 6 hours. In yet another preferred embodiment, the time period is 10 to 24 hours. In one preferred embodiment, the incubation time period is 24 hours. For isolation of T cells from patients with leukemia, use of longer incubation times, such as 24 hours, can increase cell yield. Longer incubation times may be used to isolate T cells in any situation where there are few T cells as compared to other cell types, such in isolating tumor infiltrating lymphocytes (TIL) from tumor tissue or from immunocompromised individuals. Further, use of longer incubation times can increase the efficiency of capture of CD8+ T cells.

[0687] Enrichment of a T cell population by negative selection can be accomplished with a combination of antibodies directed to surface markers unique to the negatively selected cells. A preferred method is cell sorting and/or selection via negative magnetic immunoadherence or flow cytometry that uses a cocktail of monoclonal antibodies directed to cell surface markers present on the cells negatively selected. For example, to enrich for CD4+ cells by negative selection, a monoclonal antibody cocktail typically includes antibodies to CD14, CD20, CD11b, CD16, HLA-DR, and CD8.

[0688] Further, monocyte populations (e.g., CD14+ cells) may be depleted from blood preparations by a variety of methodologies, including anti-CD14 coated beads or columns, or utilization of the phagocytotic activity of these cells to facilitate removal. Accordingly, in one embodiment, the invention uses paramagnetic particles of a size sufficient to be engulfed by phagocytotic monocytes. In an embodiment, the paramagnetic particles are commercially available beads, for example, those produced by Life Technologies under the trade name Dynabeads™. In one embodiment, other non-specific cells are removed by coating the paramagnetic particles with “irrelevant” proteins (e.g., serum proteins or antibodies). Irrelevant proteins and antibodies include those proteins and antibodies or fragments thereof that do not specifically target the T cells to be isolated. In an embodiment, the irrelevant beads include beads coated with sheep anti-mouse antibodies, goat anti-mouse antibodies, and human serum albumin.

[0689] In brief, such depletion of monocytes is performed by preincubating T cells isolated from whole blood, apheresed peripheral blood, or tumors with one or more varieties of irrelevant or non-antibody coupled paramagnetic particles at any amount that allows for removal of monocytes (approximately a 20:1 bead:cell ratio) for about 30 minutes to 2 hours at 22 to 37 degrees C., followed by magnetic removal of cells which have attached to or engulfed the paramagnetic particles. Such separation can be performed using standard methods available in the art. For example, any magnetic separation methodology may be used including a variety of which are commercially available, (e.g., DYNAL® Magnetic Particle Concentrator (DYNAL MPC®)). Assurance of requisite depletion can be monitored by a variety of methodologies known to those of ordinary skill in the art, including flow cytometric analysis of CD14 positive cells, before and after depletion.

[0690] For isolation of a desired population of cells by positive or negative selection, the concentration of cells and surface (e.g., particles such as beads) can be varied. In an embodiment, it may be desirable to significantly decrease the volume in which beads and cells are mixed together (i.e., increase the concentration of cells), to ensure maximum contact of cells and beads. For example, in one embodiment, a concentration of 2 billion cells/ml is used. In one embodiment, a concentration of 1 billion cells/ml is used. In a further embodiment, greater than 100 million cells/ml is used. In a further embodiment, a concentration of cells of 10, 15, 20, 25, 30, 35, 40, 45, or 50 million cells/ml is used. In yet another embodiment, a concentration of cells from 75, 80, 85, 90, 95, or 100 million cells/ml is used. In further embodiments, concentrations of 125 or 150 million cells/ml can be used. Using high concentrations can result in increased cell yield, cell activation, and cell expansion. Further, use of high cell concentrations allows more efficient capture of cells that may weakly express target antigens of interest, such as CD28-negative T cells, or from samples where there are many tumor cells present (i.e., leukemic blood, tumor tissue, etc.). Such populations of cells may have therapeutic value and would be desirable to obtain. For example, using high concentration of cells allows more efficient selection of CD8+ T cells that normally have weaker CD28 expression.

[0691] In a related embodiment, it may be desirable to use lower concentrations of cells. By significantly diluting the mixture of T cells and surface (e.g., particles such as beads), interactions between the particles and cells are minimized. This selects for cells that express high amounts of desired antigens to be bound to the particles. For example, CD4+ T cells express higher levels of CD28 and are more efficiently captured than CD8+ T cells in dilute concentrations. In one embodiment, the concentration of cells used is 5×106/ml. In other embodiments, the concentration used can be from about 1×105/ml to 1×106/ml, and any integer value in between.

[0692] T cells can also be frozen. Wishing not to be bound by theory, the freeze and subsequent thaw step provides a more uniform product by removing granulocytes and to some extent monocytes in the cell population. After a washing step to remove plasma and platelets, the cells may be suspended in a freezing solution. While many freezing solutions and parameters are known in the art and will be useful in this context, one method involves using PBS containing 20% DMSO and 8% human serum albumin, or other suitable cell freezing media, the cells then are frozen to −80° C. at a rate of 1° per minute and stored in the vapor phase of a liquid nitrogen storage tank. Other methods of controlled freezing may be used as well as uncontrolled freezing immediately at −20° C. or in liquid nitrogen.

[0693] T cells for use in the present invention may also be antigen-specific T cells. For example, tumor-specific T cells can be used. In an embodiment, antigen-specific T cells can be isolated from a patient of interest, such as a patient afflicted with a cancer or an infectious disease. In one embodiment, neoepitopes are determined for a subject and T cells specific to these antigens are isolated. Antigen-specific cells for use in expansion may also be generated in vitro using any number of methods known in the art, for example, as described in U.S. Patent Publication No. U.S. 20040224402 entitled, Generation and Isolation of Antigen-Specific T Cells, or in U.S. Pat. No. 6,040,177. Antigen-specific cells for use in the present invention may also be generated using any number of methods known in the art, for example, as described in Current Protocols in Immunology, or Current Protocols in Cell Biology, both published by John Wiley & Sons, Inc., Boston, Mass.

[0694] In a related embodiment, it may be desirable to sort or otherwise positively select (e.g., via magnetic selection) the antigen specific cells prior to or following one or two rounds of expansion. Sorting or positively selecting antigen-specific cells can be carried out using peptide-MHC tetramers (Altman, et al., Science. 1996 Oct. 4; 274(5284):94-6). In another embodiment, the adaptable tetramer technology approach is used (Andersen et al., 2012 Nat Protoc. 7:891-902). Tetramers are limited by the need to utilize predicted binding peptides based on prior hypotheses, and the restriction to specific HLAs. Peptide-MHC tetramers can be generated using techniques known in the art and can be made with any MHC molecule of interest and any antigen of interest as described herein. Specific epitopes to be used in this context can be identified using numerous assays known in the art. For example, the ability of a polypeptide to bind to MHC class I may be evaluated indirectly by monitoring the ability to promote incorporation of 1251 labeled β2-microglobulin (B2m) into MHC class I/B2m/peptide heterotrimeric complexes (see Parker et al., J. Immunol. 152:163, 1994).

[0695] In one embodiment cells are directly labeled with an epitope-specific reagent for isolation by flow cytometry followed by characterization of phenotype and TCRs. In one embodiment, T cells are isolated by contacting with T cell specific antibodies. Sorting of antigen-specific T cells, or generally any cells of the present invention, can be carried out using any of a variety of commercially available cell sorters, including, but not limited to, MoFlo sorter (DakoCytomation, Fort Collins, Colo.), FACSAria™, FACSArray™, FACSVantage™, BD™ LSR II, and FACSCalibur™ (BD Biosciences, San Jose, Calif.).

[0696] In a preferred embodiment, the method comprises selecting cells that also express CD3. The method may comprise specifically selecting the cells in any suitable manner. Preferably, the selecting is carried out using flow cytometry. The flow cytometry may be carried out using any suitable method known in the art. The flow cytometry may employ any suitable antibodies and stains. Preferably, the antibody is chosen such that it specifically recognizes and binds to the particular biomarker being selected. For example, the specific selection of CD3, CD8, TIM-3, LAG-3, 4-1BB, or PD-1 may be carried out using anti-CD3, anti-CD8, anti-TIM-3, anti-LAG-3, anti-4-1BB, or anti-PD-1 antibodies, respectively. The antibody or antibodies may be conjugated to a bead (e.g., a magnetic bead) or to a fluorochrome. Preferably, the flow cytometry is fluorescence-activated cell sorting (FACS). TCRs expressed on T cells can be selected based on reactivity to autologous tumors. Additionally, T cells that are reactive to tumors can be selected for based on markers using the methods described in patent publication Nos. WO2014133567 and WO2014133568, herein incorporated by reference in their entirety. Additionally, activated T cells can be selected for based on surface expression of CD107a.

[0697] In one embodiment of the invention, the method further comprises expanding the numbers of T cells in the enriched cell population. Such methods are described in U.S. Pat. No. 8,637,307 and is herein incorporated by reference in its entirety. The numbers of T cells may be increased at least about 3-fold (or 4-, 5-, 6-, 7-, 8-, or 9-fold), more preferably at least about 10-fold (or 20-, 30-, 40-, 50-, 60-, 70-, 80-, or 90-fold), more preferably at least about 100-fold, more preferably at least about 1,000-fold, or most preferably at least about 100,000-fold. The numbers of T cells may be expanded using any suitable method known in the art. Exemplary methods of expanding the numbers of cells are described in patent publication No. WO 2003057171, U.S. Pat. No. 8,034,334, and U.S. Patent Application Publication No. 2012/0244133, each of which is incorporated herein by reference.

[0698] In one embodiment, ex vivo T cell expansion can be performed by isolation of T cells and subsequent stimulation or activation followed by further expansion. In one embodiment of the invention, the T cells may be stimulated or activated by a single agent. In another embodiment, T cells are stimulated or activated with two agents, one that induces a primary signal and a second that is a co-stimulatory signal. Ligands useful for stimulating a single signal or stimulating a primary signal and an accessory molecule that stimulates a second signal may be used in soluble form. Ligands may be attached to the surface of a cell, to an Engineered Multivalent Signaling Platform (EMSP), or immobilized on a surface. In a preferred embodiment both primary and secondary agents are co-immobilized on a surface, for example a bead or a cell. In one embodiment, the molecule providing the primary activation signal may be a CD3 ligand, and the co-stimulatory molecule may be a CD28 ligand or 4-1BB ligand.

[0699] In an embodiment, T cells comprising a CAR or an exogenous TCR, may be manufactured as described in WO2015120096, by a method comprising: enriching a population of lymphocytes obtained from a donor subject; stimulating the population of lymphocytes with one or more T-cell stimulating agents to produce a population of activated T cells, wherein the stimulation is performed in a closed system using serum-free culture medium; transducing the population of activated T cells with a viral vector comprising a nucleic acid molecule which encodes the CAR or TCR, using a single cycle transduction to produce a population of transduced T cells, wherein the transduction is performed in a closed system using serum-free culture medium; and expanding the population of transduced T cells for a predetermined time to produce a population of engineered T cells, wherein the expansion is performed in a closed system using serum-free culture medium. In an embodiment, T cells comprising a CAR or an exogenous TCR, may be manufactured as described in WO2015120096, by a method comprising: obtaining a population of lymphocytes; stimulating the population of lymphocytes with one or more stimulating agents to produce a population of activated T cells, wherein the stimulation is performed in a closed system using serum-free culture medium; transducing the population of activated T cells with a viral vector comprising a nucleic acid molecule which encodes the CAR or TCR, using at least one cycle transduction to produce a population of transduced T cells, wherein the transduction is performed in a closed system using serum-free culture medium; and expanding the population of transduced T cells to produce a population of engineered T cells, wherein the expansion is performed in a closed system using serum-free culture medium. The predetermined time for expanding the population of transduced T cells may be 3 days. The time from enriching the population of lymphocytes to producing the engineered T cells may be 6 days. The closed system may be a closed bag system. Further provided is population of T cells comprising a CAR or an exogenous TCR obtainable or obtained by said method, and a pharmaceutical composition comprising such cells.

[0700] In an embodiment, T cell maturation or differentiation in vitro may be delayed or inhibited by the method as described in WO2017070395, comprising contacting one or more T cells from a subject in need of a T cell therapy with an AKT inhibitor (such as, e.g., one or a combination of two or more AKT inhibitors disclosed in claim 8 of WO2017070395) and at least one of exogenous Interleukin-7 (IL-7) and exogenous Interleukin-15 (IL-15), wherein the resulting T cells exhibit delayed maturation or differentiation, and/or wherein the resulting T cells exhibit improved T cell function (such as, e.g., increased T cell proliferation; increased cytokine production; and/or increased cytolytic activity) relative to a T cell function of a T cell cultured in the absence of an AKT inhibitor.

[0701] In an embodiment, a patient in need of a T cell therapy may be conditioned by a method as described in WO2016191756 comprising administering to the patient a dose of cyclophosphamide between 200 mg/m2/day and 2000 mg/m2/day and a dose of fludarabine between 20 mg/m2/day and 900 mg/m²/day.

### Treating and Preventing Diseases Using RNA Editing

[0702] In an embodiment, the disease, disorder, and/condition or symptom thereof can be treated or prevented using a composition or system described herein. In an embodiment, the composition, system, described herein is a nucleic acid editing system. In an embodiment, treatment or prevention using a composition or system described herein can have the advantage of less immunogenicity than a nucleic acid editing composition, system, and is not as hindered by limitations on viral vector packaging size. Further, as the effect is transient, the effect can be better controlled over time and can potentially be reversible. Thus, they pose less risk of causing permeant detrimental effects than nucleic acid editing-based preventatives and treatments.

[0703] Any disease involving a dysfunctional nucleic acid molecule, where the dysfunction is the result of a mutation in the nucleic acid sequence can be treated or prevented by modifying its sequence using a composition, system, capable of nucleic acid modification described elsewhere herein. In an embodiment, the disease that can be treated or prevented using a composition, system, capable of RNA modification can be one or more of those listed in Tables 3-4, or a combination thereof. In an embodiment, the coding sequence for the gene involved in the disease is greater than the packaging capacity of a viral vector system, particularly an AAV vector system.

[0704] The potential for RNA editing has now been demonstrated in vitro and in vivo for pathogenic mutations in genes related to cystic fibrosis, Duchenne's muscular dystrophy, Hurler's syndrome, and Ornithine transcarbamylase (OTC) deficiency, among others. See e.g., Katrekar et al. Nat. Methods. 2019. 16:239-242; Montieel-Gonzalez et la. 2013. PNAS USA. 110:18285-18290; Sinnamon et al. PNAS USA 2017; Wettengel et al. Curr. Gene Ther. 2018, 18:31-39; Qu et al. BioRxiv. 2019., 605972; and Fry et al. 2020. Int. J. Mol. Sci. 12:777, which are incorporated by reference as if expressed in their entirety here and the teachings of which can be adapted in view of the description herein to the CRISPR-Cas Systems described herein.

[0705] In an embodiment, the disease is an inherited retinal degeneration disease. In an embodiment, gene whose transcript can be modified using a composition, system, described herein capable of nucleic acid modification that is associated with inherited retinal degeneration and whose coding sequence is too large for packaging in a single AAV can be ABC4, USH2A, CEP290, MYO7A, EYS, and CDH23.

### Models of Diseases and Conditions

[0706] In an aspect, the invention provides a method of modeling a disease associated with a genomic locus in a eukaryotic organism or a non-human organism comprising manipulation of a target sequence within a coding, non-coding or regulatory element of said genomic locus comprising delivering a non-naturally occurring or engineered composition comprising a viral vector system comprising one or more viral vectors operably encoding a composition for expression thereof, wherein the composition comprises particle delivery system or the delivery system or the virus particle of any one of the above embodiments or the cell of any one of the above embodiment.

[0707] In one aspect, the invention provides a method of generating a model eukaryotic cell that can include one or more a mutated disease genes and/or infectious microorganisms. In an embodiment, a disease gene is any gene associated an increase in the risk of having or developing a disease. In an embodiment, the method includes (a) introducing one or more vectors into a eukaryotic cell, wherein the one or more vectors comprise a composition, system, and/or component thereof and/or a vector or vector system that is capable of driving expression of a composition, system, and/or component thereof including, but not limited to: a guide sequence optionally linked to a tracr mate sequence, a tracr sequence, one or more Cas effectors, and combinations thereof and (b) allowing a composition, system, or complex to bind to one or more target polynucleotides, e.g., to effect cleavage, nicking, or other modification of the target polynucleotide within said disease gene, wherein the composition, system, or complex is composed of one or more CRISPR-Cas effectors complexed with (1) one or more guide sequences that is/are hybridized to the target sequence(s) within the target polynucleotide(s), and optionally (2) the tracr mate sequence(s) that is/are hybridized to the tracr sequence(s), thereby generating a model eukaryotic cell comprising one or more mutated disease gene(s). Thus, in an embodiment the composition, system, contains nucleic acid molecules for and drives expression of one or more of: a Cas effector, a guide sequence linked to a tracr mate sequence, and a tracr sequence and/or a

[0708] Homologous Recombination template and/or a stabilizing ligand if the Cas effector has a destabilization domain. In an embodiment, said cleavage comprises cleaving one or two strands at the location of the target sequence by the Cas effector(s). In an embodiment, nicking comprises nicking one or two strands at the location of the target sequence by the Cas effector(s). In an embodiment, said cleavage or nicking results in modified transcription of a target polynucleotide. In an embodiment, modification results in decreased transcription of the target polynucleotide. In an embodiment, the method further comprises repairing said cleaved or nicked target polynucleotide by homologous recombination with an exogenous template polynucleotide, wherein said repair results in a mutation comprising an insertion, deletion, or substitution of one or more nucleotides of said target polynucleotide. In an embodiment, said mutation results in one or more amino acid changes in a protein expression from a gene comprising the target sequence.

[0709] The disease modeled can be any disease with a genetic or epigenetic component. In an embodiment, the disease modeled can be any as discussed elsewhere herein, including but not limited to any as set forth in Tables 4 and 5 herein.

### In Situ Disease Detection

[0710] The compositions, systems, and/or components thereof can be used for diagnostic methods of detection such as in CASFISH (see e.g., Deng et al. 2015. PNAS USA 112(38): 11870-11875), CRISPR-Live FISH (see e.g., Wang et al. 2020. Science; 365(6459):1301-1305), sm-FISH (Lee and Jefcoate. 2017. Front. Endocrinol. doi.org/10.3389/fendo.2017.00289), sequential FISH CRISPRainbow (Ma et al. Nat Biotechnol, 34 (2016), pp. 528-530), CRISPR-Sirius (Nat Methods, 15 (2018), pp. 928-931), Casilio (Cheng et al. Cell Res, 26 (2016), pp. 254-257), Halo-Tag based genomic loci visualization techniques (e.g., Deng et al. 2015. PNAS USA 112(38): 11870-11875; Knight et al., Science, 350 (2015), pp. 823-826), RNA-aptamer based methods (e.g., Ma et al., J Cell Biol, 214 (2016), pp. 529-537), molecular beacon-based methods (e.g., Zhao et al. Biomaterials, 100 (2016), pp. 172-183; Wu et al. Nucleic Acids Res (2018)), Quantum Dot-based systems (e.g., Ma et al. Anal Chem, 89 (2017), pp. 12896-12901), multiplexed methods (e.g., Ma et al., Proc Natl Acad Sci USA, 112 (2015), pp. 3002-3007; Fu et al. Nat Commun, 7 (2016), p. 11707; Ma et al. Nat Biotechnol, 34 (2016), pp. 528-530; Shao et al. Nucleic Acids Res, 44 (2016), Article e86); Wang et al. Sci Rep, 6 (2016), p. 26857), ç, and other in situ CRISPR-hybridization based methods (e.g., Chen et al. Cell, 155 (2013), pp. 1479-1491; Gu et al. Science, 359 (2018), pp. 1050-1055; Tanebaum et al. Cell, 159 (2014), pp. 635-646; Ye et al. Protein Cell, 8 (2017), pp. 853-855; Chen et al. Nat Commun, 9 (2018), p. 5065; Shao et al. ACS Synth Biol (2017); Fu et al. Nat Commun, 7 (2016), p. 11707; Shao et al. Nucleic Acids Res, 44 (2016), Article e86; Wang et al., Sci Rep, 6 (2016), p. 26857), all of which are incorporated by reference herein as if expressed in their entirety and whose teachings can be adapted to the compositions, systems, and components thereof described herein in view of the description herein.

[0711] In an embodiment, the composition, system, or component thereof can be used in a detection method, such as an in situ detection method described herein. In an embodiment, the composition, system, or component thereof can include a catalytically inactivate Cas effector described herein and use this system in detection methods such as fluorescence in situ hybridization (FISH) or any other described herein. In an embodiment, the inactivated Cas effector, which lacks the ability to produce DNA double-strand breaks may be fused with a marker, such as fluorescent protein, such as the enhanced green fluorescent protein (eEGFP) and co-expressed with small guide RNAs to target pericentric, centric and telomeric repeats in vivo. The dCas effector or system thereof can be used to visualize both repetitive sequences and individual genes in the human genome. Such new applications of labelled dCas effector and compositions, systems, thereof can be important in imaging cells and studying the functional nuclear architecture, especially in cases with a small nucleus volume or complex 3-D structures.

### Cell Selection

[0712] In an embodiment, the compositions, systems, and/or components thereof described herein can be used in a method to screen and/or select cells. In an embodiment, composition, system-based screening/selection method can be used to identify diseased cells in a cell population. In an embodiment, selection of the cells results in a modification in the cells such that the selected cells die. In this way, diseased cells can be identified, and removed from the healthy cell population. In an embodiment, the diseased cells can be a cancer cell, pre-cancerous cell, a virus or other pathogenic organism infected cells, or otherwise abnormal cell. In an embodiment, the modification can impart another detectable change in the cells to be selected (e.g., a functional change and/or genomic barcode) that facilitates selection of the desired cells. In an embodiment, a negative selection scheme can be used to obtain a desired cell population. In these embodiments, the cells to be selected against are modified, thus can be removed from the cell population based on their death or identification or sorting based the detectable change imparted on the cells. Thus, in these embodiments, the remaining cells after selection are the desired cell population.

[0713] In an embodiment, a method of selecting one or more cell(s) containing a polynucleotide modification can include: introducing one or more composition, system(s), and/or components thereof, and/or vectors or vector systems into the cell(s), wherein the composition, system(s), and/or components thereof, and/or vectors or vector systems contains and/or is capable of expressing one or more of: a Cas effector, a guide sequence optionally linked to a tracr mate sequence, a tracr sequence, and an editing template; wherein, for example that which is being expressed is within and expressed in vivo by the composition, system, vector or vector system and/or the editing template comprises the one or more mutations that abolish Cas effector cleavage; allowing homologous recombination of the editing template with the target polynucleotide in the cell(s) to be selected; allowing a composition, system, or complex to bind to a target polynucleotide to effect cleavage of the target polynucleotide within said gene, wherein the AAV-CAST complex comprises the Cas effector complexed with (1) the guide sequence that is hybridized to the target sequence within the target polynucleotide, and (2) the tracr mate sequence that is hybridized to the tracr sequence, wherein binding of the complex to the target polynucleotide induces cell death or imparts some other detectable change to the cell, thereby allowing one or more cell(s) in which one or more mutations have been introduced to be selected. In an embodiment, the cell to be selected may be a eukaryotic cell. In an embodiment, the cell to be selected may be a prokaryotic cell. Selection of specific cells via the methods herein can be performed without requiring a selection marker or a two-step process that may include a counter-selection system.

### Therapeutic Agent Development

[0714] The compositions, systems, and components thereof described herein can be used to develop CRISPR-Cas-based and non-CRISPR-Cas-based biologically active agents, such as small molecule therapeutics. Thus, described herein are methods for developing a biologically active agent that modulates a cell function and/or signaling event associated with a disease and/or disease gene. In an embodiment, the method comprises (a) contacting a test compound with a diseased cell and/or a cell containing a disease gene cell; and (b) detecting a change in a readout that is indicative of a reduction or an augmentation of a cell signaling event or other cell functionality associated with said disease or disease gene, thereby developing said biologically active agent that modulates said cell signaling event or other functionality associated with said disease gene. In an embodiment, the diseased cell is a model cell described elsewhere herein. In an embodiment, the diseased cell is a diseased cell isolated from a subject in need of treatment. In an embodiment, the test compound is a small molecule agent. In an embodiment, test compound is a small molecule agent. In an embodiment, the test compound is a biologic molecule agent.

[0715] In an embodiment, the method involves developing a therapeutic based on the composition, system, described herein. In particular embodiments, the therapeutic comprises a Cas effector and/or a guide RNA capable of hybridizing to a target sequence of interest. In particular embodiments, the therapeutic is a vector or vector system that can contain a) a first regulatory element operably linked to a nucleotide sequence encoding the Cas effector protein(s); and b) a second regulatory element operably linked to one or more nucleotide sequences encoding one or more nucleic acid molecules comprising a guide RNA comprising a guide sequence, a direct repeat sequence; wherein components (a) and (b) are located on same or different vectors. In particular embodiments, the biologically active agent is a composition comprising a delivery system operably configured to deliver composition, system, or components thereof, and/or or one or more polynucleotide sequences, vectors, or vector systems containing or encoding said components into a cell and capable of forming a complex with the components of the composition and system herein, and wherein said complex is operable in the cell. In an embodiment, the complex can include the Cas effector protein(s) as described herein, guide RNA comprising the guide sequence, and a direct repeat sequence. In any such compositions, the delivery system can be a yeast system, a lipofection system, a microinjection system, a biolistic system, virosomes, liposomes, immunoliposomes, polycations, lipid: nucleic acid conjugates or artificial virions, or any other system as described herein. In particular embodiments, the delivery is via a particle, a nanoparticle, a lipid or a cell penetrating peptide (CPP).

[0716] Also described herein are methods for developing or designing a composition, system, optionally a composition, system, based therapy or therapeutic, comprising (a) selecting for a (therapeutic) locus of interest gRNA target sites, wherein said target sites have minimal sequence variation across a population, and from said selected target sites subselecting target sites, wherein a gRNA directed against said target sites recognizes a minimal number of off-target sites across said population, or (b) selecting for a (therapeutic) locus of interest gRNA target sites, wherein said target sites have minimal sequence variation across a population, or selecting for a (therapeutic) locus of interest gRNA target sites, wherein a gRNA directed against said target sites recognizes a minimal number of off-target sites across said population, and optionally estimating the number of (sub) selected target sites needed to treat or otherwise modulate or manipulate a population, and optionally validating one or more of the (sub) selected target sites for an individual subject, optionally designing one or more gRNA recognizing one or more of said (sub) selected target sites.

[0717] In an embodiment, the method for developing or designing a gRNA for use in a composition, system, optionally a composition, system, based therapy or therapeutic, can include (a) selecting for a (therapeutic) locus of interest gRNA target sites, wherein said target sites have minimal sequence variation across a population, and from said selected target sites subselecting target sites, wherein a gRNA directed against said target sites recognizes a minimal number of off-target sites across said population, or (b) selecting for a (therapeutic) locus of interest gRNA target sites, wherein said target sites have minimal sequence variation across a population, or selecting for a (therapeutic) locus of interest gRNA target sites, wherein a gRNA directed against said target sites recognizes a minimal number of off-target sites across said population, and optionally estimating the number of (sub) selected target sites needed to treat or otherwise modulate or manipulate a population, optionally validating one or more of the (sub) selected target sites for an individual subject, optionally designing one or more gRNA recognizing one or more of said (sub) selected target sites.

[0718] In an embodiment, thee method for developing or designing a composition, system, optionally a composition, system, based therapy or therapeutic in a population, can include (a) selecting for a (therapeutic) locus of interest gRNA target sites, wherein said target sites have minimal sequence variation across a population, and from said selected target sites subselecting target sites, wherein a gRNA directed against said target sites recognizes a minimal number of off-target sites across said population, or (b) selecting for a (therapeutic) locus of interest gRNA target sites, wherein said target sites have minimal sequence variation across a population, or selecting for a (therapeutic) locus of interest gRNA target sites, wherein a gRNA directed against said target sites recognizes a minimal number of off-target sites across said population, and optionally estimating the number of (sub) selected target sites needed to treat or otherwise modulate or manipulate a population, optionally validating one or more of the (sub) selected target sites for an individual subject, optionally designing one or more gRNA recognizing one or more of said (sub) selected target sites.

[0719] In an embodiment the method for developing or designing a gRNA for use in a composition, system, optionally a composition, system, based therapy or therapeutic in a population, can include (a) selecting for a (therapeutic) locus of interest gRNA target sites, wherein said target sites have minimal sequence variation across a population, and from said selected target sites subselecting target sites, wherein a gRNA directed against said target sites recognizes a minimal number of off-target sites across said population, or (b) selecting for a (therapeutic) locus of interest gRNA target sites, wherein said target sites have minimal sequence variation across a population, or selecting for a (therapeutic) locus of interest gRNA target sites, wherein a gRNA directed against said target sites recognizes a minimal number of off-target sites across said population, and optionally estimating the number of (sub) selected target sites needed to treat or otherwise modulate or manipulate a population, optionally validating one or more of the (sub) selected target sites for an individual subject, optionally designing one or more gRNA recognizing one or more of said (sub) selected target sites.

[0720] In an embodiment, the method for developing or designing a composition, system, such as a composition, system, based therapy or therapeutic, optionally in a population; or for developing or designing a gRNA for use in a composition, system, optionally a composition, system, based therapy or therapeutic, optionally in a population, can include: selecting a set of target sequences for one or more loci in a target population, wherein the target sequences do not contain variants occurring above a threshold allele frequency in the target population (i.e. platinum target sequences); removing from said selected (platinum) target sequences any target sequences having high frequency off-target candidates (relative to other (platinum) targets in the set) to define a final target sequence set; preparing one or more, such as a set of compositions, systems, based on the final target sequence set, optionally wherein a number of CRISP-Cas systems prepared is based (at least in part) on the size of a target population.

[0721] In an embodiment, off-target candidates/off-targets, PAM restrictiveness, target cleavage efficiency, or effector protein specificity is identified or determined using a sequencing-based double-strand break (DSB) detection assay, such as described herein elsewhere. In an embodiment, off-target candidates/off-targets are identified or determined using a sequencing-based double-strand break (DSB) detection assay, such as described herein elsewhere. In an embodiment, off-targets, or off target candidates have at least 1, preferably 1-3, mismatches or (distal) PAM mismatches, such as 1 or more, such as 1, 2, 3, or more (distal) PAM mismatches. In an embodiment, sequencing based DSB detection assay comprises labeling a site of a DSB with an adapter comprising a primer binding site, labeling a site of a DSB with a barcode or unique molecular identifier, or combination thereof, as described herein elsewhere.

[0722] It will be understood that the guide sequence of the gRNA is 100% complementary to the target site, i.e., does not comprise any mismatch with the target site. It will be further understood that “recognition” of an (off-)target site by a gRNA presupposes composition, system, functionality, i.e., an (off-)target site is only recognized by a gRNA if binding of the gRNA to the (off-)target site leads to composition, system, activity (such as induction of single or double strand DNA cleavage, transcriptional modulation, etc.).

[0723] In an embodiment, the target sites having minimal sequence variation across a population are characterized by absence of sequence variation in at least 99%, preferably at least 99.9%, more preferably at least 99.99% of the population. In an embodiment, optimizing target location comprises selecting target sequences or loci having an absence of sequence variation in at least 99%, preferably at least 99.9%, more preferably at least 99.99% of a population. These targets are referred to herein elsewhere also as “platinum targets”. In an embodiment, said population comprises at least 1000 individuals, such as at least 5000 individuals, such as at least 10000 individuals, such as at least 50000 individuals.

[0724] In an embodiment, the off-target sites are characterized by at least one mismatch between the off-target site and the gRNA. In an embodiment, the off-target sites are characterized by at most five, preferably at most four, more preferably at most three mismatches between the off-target site and the gRNA. In an embodiment, the off-target sites are characterized by at least one mismatch between the off-target site and the gRNA and by at most five, preferably at most four, more preferably at most three mismatches between the off-target site and the gRNA.

[0725] In an embodiment, said minimal number of off-target sites across said population is determined for high-frequency haplotypes in said population. In an embodiment, said minimal number of off-target sites across said population is determined for high-frequency haplotypes of the off-target site locus in said population. In an embodiment, said minimal number of off-target sites across said population is determined for high-frequency haplotypes of the target site locus in said population. In an embodiment, the high-frequency haplotypes are characterized by occurrence in at least 0.1% of the population.

[0726] In an embodiment, the number of (sub) selected target sites needed to treat a population is estimated based on based low frequency sequence variation, such as low frequency sequence variation captured in large scale sequencing datasets. In an embodiment, the number of (sub) selected target sites needed to treat a population of a given size is estimated.

[0727] In an embodiment, the method further comprises obtaining genome sequencing data of a subject to be treated; and treating the subject with a composition, system, selected from the set of compositions, systems, wherein the composition, system, selected is based (at least in part) on the genome sequencing data of the individual. In an embodiment, the ((sub) selected) target is validated by genome sequencing, preferably whole genome sequencing.

[0728] In an embodiment, target sequences or loci as described herein are (further) selected based on optimization of one or more parameters, such as PAM type (natural or modified), PAM nucleotide content, PAM length, target sequence length, PAM restrictiveness, target cleavage efficiency, and target sequence position within a gene, a locus or other genomic region. Methods of optimization are discussed in greater detail elsewhere herein.

[0729] In an embodiment, target sequences or loci as described herein are (further) selected based on optimization of one or more of target loci location, target length, target specificity, and PAM characteristics. As used herein, PAM characteristics may comprise for instance PAM sequence, PAM length, and/or PAM GC contents. In an embodiment, optimizing PAM characteristics comprises optimizing nucleotide content of a PAM. In an embodiment, optimizing nucleotide content of PAM is selecting a PAM with a motif that maximizes abundance in the one or more target loci, minimizes mutation frequency, or both. Minimizing mutation frequency can for instance be achieved by selecting PAM sequences devoid of or having low or minimal CpG.

[0730] In an embodiment, the effector protein for each composition, system, in the set of compositions, systems, is selected based on optimization of one or more parameters selected from the group consisting of; effector protein size, ability of effector protein to access regions of high chromatin accessibility, degree of uniform enzyme activity across genomic targets, epigenetic tolerance, mismatch/budge tolerance, effector protein specificity, effector protein stability or half-life, effector protein immunogenicity or toxicity. Methods of optimization are discussed in greater detail elsewhere herein.

### Optimization of the Systems

[0731] The methods of the present invention can involve optimization of selected parameters or variables associated with the composition, system, and/or its functionality, as described herein further elsewhere. Optimization of the composition, system, in the methods as described herein may depend on the target(s), such as the therapeutic target or therapeutic targets, the mode or type of composition, system, modulation, such as composition, system, based therapeutic target(s) modulation, modification, or manipulation, as well as the delivery of the composition, system, components. One or more targets may be selected, depending on the genotypic and/or phenotypic outcome. For instance, one or more therapeutic targets may be selected, depending on (genetic) disease etiology or the desired therapeutic outcome. The (therapeutic) target(s) may be a single gene, locus, or other genomic site, or may be multiple genes, loci or other genomic sites. As is known in the art, a single gene, locus, or other genomic site may be targeted more than once, such as by use of multiple gRNAs.

[0732] The activity of the composition and/or system, such as CRISPR-Cas or CAST system-based therapy or therapeutics may involve target disruption, such as target mutation, such as leading to gene knockout. The activity of the composition and/or system, such as CRISPR-Cas or CAST system-based therapy or therapeutics may involve replacement of particular target sites, such as leading to target correction. CRISPR-Cas or CAST system-based therapy or therapeutics may involve removal of particular target sites, such as leading to target deletion. The activity of the composition and/or system, such as CRISPR-Cas or CAST system-based therapy or therapeutics may involve modulation of target site functionality, such as target site activity or accessibility, leading for instance to (transcriptional and/or epigenetic) gene or genomic region activation or gene or genomic region silencing. The skilled person will understand that modulation of target site functionality may involve CRISPR effector mutation (such as for instance generation of a catalytically inactive CRISPR effector) and/or functionalization (such as for instance fusion of the CRISPR effector with a heterologous functional domain, such as a transcriptional activator or repressor), as described herein elsewhere.

[0733] Accordingly, in an aspect, the invention relates to a method as described herein, comprising selection of one or more (therapeutic) target, selecting one or more functionality of the composition and/or system, and optimization of selected parameters or variables associated with the CRISPR-Cas or CAST system and/or its functionality. In a related aspect, the invention relates to a method as described herein, comprising (a) selecting one or more (therapeutic) target loci, (b) selecting one or more CRISPR-Cas system functionalities, (c) optionally selecting one or more modes of delivery, and preparing, developing, or designing a CRISPR-Cas system or CAST selected based on steps (a)-(c).

[0734] In an embodiment, the functionality of the composition and/or system comprises genomic mutation. In an embodiment, the functionality of the composition and/or system comprises single genomic mutation. In an embodiment, the functionality of the composition and/or system functionality comprises multiple genomic mutation. In an embodiment, the functionality of the composition and/or system comprises gene knockout. In an embodiment, the functionality of the composition and/or system comprises single gene knockout. In an embodiment, the functionality of the composition and/or system comprises multiple gene knockout. In an embodiment, the functionality of the composition and/or system comprises gene correction. In an embodiment, the functionality of the composition and/or system comprises single gene correction. In an embodiment, the functionality of the composition and/or system comprises multiple gene correction. In an embodiment, the functionality of the composition and/or system comprises genomic region correction. In an embodiment, the functionality of the composition and/or system comprises single genomic region correction. In an embodiment, the functionality of the composition and/or system comprises multiple genomic region correction. In an embodiment, the functionality of the composition and/or system comprises gene deletion. In an embodiment, the functionality of the composition and/or system comprises single gene deletion. In an embodiment, the functionality of the composition and/or system comprises multiple gene deletion. In an embodiment, the functionality of the composition and/or system comprises genomic region deletion. In an embodiment, the functionality of the composition and/or system comprises single genomic region deletion. In an embodiment, the functionality of the composition and/or system comprises multiple genomic region deletion. In an embodiment, the functionality of the composition and/or system comprises modulation of gene or genomic region functionality. In an embodiment, the functionality of the composition and/or system comprises modulation of single gene or genomic region functionality. In an embodiment, the functionality of the composition and/or system comprises modulation of multiple gene or genomic region functionality. In an embodiment, the functionality of the composition and/or system comprises gene or genomic region functionality, such as gene or genomic region activity. In an embodiment, the functionality of the composition and/or system comprises single gene or genomic region functionality, such as gene or genomic region activity. In an embodiment, the functionality of the composition and/or system comprises multiple gene or genomic region functionality, such as gene or genomic region activity. In an embodiment, the functionality of the composition and/or system comprises modulation gene activity or accessibility optionally leading to transcriptional and/or epigenetic gene or genomic region activation or gene or genomic region silencing. In an embodiment, the functionality of the composition and/or system comprises modulation single gene activity or accessibility optionally leading to transcriptional and/or epigenetic gene or genomic region activation or gene or genomic region silencing. In an embodiment, the functionality of the composition and/or system comprises modulation multiple gene activity or accessibility optionally leading to transcriptional and/or epigenetic gene or genomic region activation or gene or genomic region silencing.

[0735] Optimization of selected parameters or variables in the methods as described herein may result in optimized or improved the system, such as CISPR-Cas or CAST system-based therapy or therapeutic, specificity, efficacy, and/or safety. In an embodiment, one or more of the following parameters or variables are taken into account, are selected, or are optimized in the methods of the invention as described herein: Cas protein allosteric interactions, Cas protein functional domains and functional domain interactions, CRISPR effector specificity, gRNA specificity, CRISPR-Cas complex specificity, PAM restrictiveness, PAM type (natural or modified), PAM nucleotide content, PAM length, CRISPR effector activity, gRNA activity, CRISPR-Cas complex activity, target cleavage efficiency, target site selection, target sequence length, ability of effector protein to access regions of high chromatin accessibility, degree of uniform enzyme activity across genomic targets, epigenetic tolerance, mismatch/budge tolerance, CRISPR effector stability, CRISPR effector mRNA stability, gRNA stability, CRISPR-Cas or CAST complex stability, CRISPR effector protein or mRNA immunogenicity or toxicity, gRNA immunogenicity or toxicity, CRISPR-Cas complex immunogenicity or toxicity, CRISPR effector protein or mRNA dose or titer, gRNA dose or titer, CRISPR-Cas or CAST complex dose or titer, CRISPR effector protein size, CRISPR effector expression level, gRNA expression level, CRISPR-Cas or CAST complex expression level, CRISPR effector spatiotemporal expression, gRNA spatiotemporal expression, CRISPR-Cas or CAST complex spatiotemporal expression.

[0736] By means of example, and without limitation, parameter or variable optimization may be achieved as follows. CRISPR effector specificity may be optimized by selecting the most specific CRISPR effector. This may be achieved for instance by selecting the most specific CRISPR effector orthologue or by specific CRISPR effector mutations which increase specificity. gRNA specificity may be optimized by selecting the most specific gRNA. This can be achieved for instance by selecting gRNA having low homology, i.e., at least one or preferably more, such as at least 2, or preferably at least 3, mismatches to off-target sites. CRISPR-Cas complex specificity may be optimized by increasing CRISPR effector specificity and/or gRNA specificity as above. PAM restrictiveness may be optimized by selecting a CRISPR effector having to most restrictive PAM recognition. This can be achieved for instance by selecting a CRISPR effector orthologue having more restrictive PAM recognition or by specific CRISPR effector mutations which increase or alter PAM restrictiveness. PAM type may be optimized for instance by selecting the appropriate CRISPR effector, such as the appropriate CRISPR effector recognizing a desired PAM type. The CRISPR effector or PAM type may be naturally occurring or may for instance be optimized based on CRISPR effector mutants having an altered PAM recognition, or PAM recognition repertoire. PAM nucleotide content may for instance be optimized by selecting the appropriate CRISPR effector, such as the appropriate CRISPR effector recognizing a desired PAM nucleotide content. The CRISPR effector or PAM type may be naturally occurring or may for instance be optimized based on CRISPR effector mutants having an altered PAM recognition, or PAM recognition repertoire. PAM length may for instance be optimized by selecting the appropriate CRISPR effector, such as the appropriate CRISPR effector recognizing a desired PAM nucleotide length. The CRISPR effector or PAM type may be naturally occurring or may for instance be optimized based on CRISPR effector mutants having an altered PAM recognition, or PAM recognition repertoire.

[0737] Target length or target sequence length may for instance be optimized by selecting the appropriate CRISPR effector, such as the appropriate CRISPR effector recognizing a desired target or target sequence nucleotide length. Alternatively, or in addition, the target (sequence) length may be optimized by providing a target having a length deviating from the target (sequence) length typically associated with the CRISPR effector, such as the naturally occurring CRISPR effector. The CRISPR effector or target (sequence) length may be naturally occurring or may for instance be optimized based on CRISPR effector mutants having an altered target (sequence) length recognition, or target (sequence) length recognition repertoire. For instance, increasing or decreasing target (sequence) length may influence target recognition and/or off-target recognition. CRISPR effector activity may be optimized by selecting the most active CRISPR effector. This may be achieved for instance by selecting the most active CRISPR effector orthologue or by specific CRISPR effector mutations which increase activity. The ability of the CRISPR effector protein to access regions of high chromatin accessibility, may be optimized by selecting the appropriate CRISPR effector or mutant thereof, and can consider the size of the CRISPR effector, charge, or other dimensional variables etc. The degree of uniform CRISPR effector activity may be optimized by selecting the appropriate CRISPR effector or mutant thereof, and can consider CRISPR effector specificity and/or activity, PAM specificity, target length, mismatch tolerance, epigenetic tolerance, CRISPR effector and/or gRNA stability and/or half-life, CRISPR effector and/or gRNA immunogenicity and/or toxicity, etc. gRNA activity may be optimized by selecting the most active gRNA. In an embodiment, this can be achieved by increasing gRNA stability through RNA modification. CRISPR-Cas complex activity may be optimized by increasing CRISPR effector activity and/or gRNA activity as above.

[0738] The target site selection may be optimized by selecting the optimal position of the target site within a gene, locus or other genomic region. The target site selection may be optimized by optimizing target location comprises selecting a target sequence with a gene, locus, or other genomic region having low variability. This may be achieved for instance by selecting a target site in an early and/or conserved exon or domain (i.e., having low variability, such as polymorphisms, within a population).

[0739] In an embodiment, optimizing target (sequence) length comprises selecting a target sequence within one or more target loci between 5 and 25 nucleotides. In an embodiment, a target sequence is 20 nucleotides.

[0740] In an embodiment, optimizing target specificity comprises selecting targets loci that minimize off-target candidates.

[0741] In an embodiment, the target site may be selected by minimization of off-target effects (e.g., off-targets qualified as having 1-5, 1-4, or preferably 1-3 mismatches compared to target and/or having one or more PAM mismatches, such as distal PAM mismatches), preferably also considering variability within a population. CRISPR effector stability may be optimized by selecting CRISPR effector having appropriate half-life, such as preferably a short half-life while still capable of maintaining sufficient activity. In an embodiment, this can be achieved by selecting an appropriate CRISPR effector orthologue having a specific half-life or by specific CRISPR effector mutations or modifications which affect half-life or stability, such as inclusion (e.g., fusion) of stabilizing or destabilizing domains or sequences. CRISPR effector mRNA stability may be optimized by increasing or decreasing CRISPR effector mRNA stability. In an embodiment, this can be achieved by increasing or decreasing CRISPR effector mRNA stability through mRNA modification. gRNA stability may be optimized by increasing or decreasing gRNA stability. In an embodiment, this can be achieved by increasing or decreasing gRNA stability through RNA modification. CRISPR-Cas or CAST complex stability may be optimized by increasing or decreasing CRISPR effector stability and/or gRNA stability as above. CRISPR effector protein or mRNA immunogenicity or toxicity may be optimized by decreasing CRISPR effector protein or mRNA immunogenicity or toxicity. In an embodiment, this can be achieved by mRNA or protein modifications. Similarly, in case of DNA based expression systems, DNA immunogenicity or toxicity may be decreased. gRNA immunogenicity or toxicity may be optimized by decreasing gRNA immunogenicity or toxicity. In an embodiment, this can be achieved by gRNA modifications. Similarly, in case of DNA based expression systems, DNA immunogenicity or toxicity may be decreased. CRISPR-Cas or CAST complex immunogenicity or toxicity may be optimized by decreasing CRISPR effector immunogenicity or toxicity and/or gRNA immunogenicity or toxicity as above, or by selecting the least immunogenic or toxic CRISPR effector/gRNA combination. Similarly, in case of DNA based expression systems, DNA immunogenicity or toxicity may be decreased. CRISPR effector protein or mRNA dose or titer may be optimized by selecting dosage or titer to minimize toxicity and/or maximize specificity and/or efficacy. gRNA dose or titer may be optimized by selecting dosage or titer to minimize toxicity and/or maximize specificity and/or efficacy. CRISPR-Cas or CAST complex dose or titer may be optimized by selecting dosage or titer to minimize toxicity and/or maximize specificity and/or efficacy. CRISPR effector protein size may be optimized by selecting minimal protein size to increase efficiency of delivery, in particular for virus mediated delivery. CRISPR effector, gRNA, or CRISPR-Cas or CAST complex expression level may be optimized by limiting (or extending) the duration of expression and/or limiting (or increasing) expression level. This may be achieved for instance by using self-inactivating compositions, systems, such as including a self-targeting (e.g., CRISPR effector targeting) gRNA, by using viral vectors having limited expression duration, by using appropriate promoters for low (or high) expression levels, by combining different delivery methods for individual CRISP-Cas or CAST system components, such as virus mediated delivery of CRISPR-effector encoding nucleic acid combined with non-virus mediated delivery of gRNA, or virus mediated delivery of gRNA combined with non-virus mediated delivery of CRISPR effector protein or mRNA. CRISPR effector, gRNA, or CRISPR-Cas or CAST complex spatiotemporal expression may be optimized by appropriate choice of conditional and/or inducible expression systems, including controllable CRISPR effector activity optionally a destabilized CRISPR effector and/or a split CRISPR effector, and/or cell- or tissue-specific expression systems.

[0742] In an aspect, the invention relates to a method as described herein, comprising selection of one or more (therapeutic) target, selecting the functionality of the composition and/or system, selecting CRISPR-Cas system mode of delivery, selecting CRISPR-Cas or CAST system delivery vehicle or expression system, and optimization of selected parameters or variables associated with the CRISPR-Cas system and/or its functionality, optionally wherein the parameters or variables are one or more selected from CRISPR effector specificity, gRNA specificity, CRISPR-Cas or CAST complex specificity, PAM restrictiveness, PAM type (natural or modified), PAM nucleotide content, PAM length, CRISPR effector activity, gRNA activity, CRISPR-Cas c or CAST complex activity, target cleavage efficiency, target site selection, target sequence length, ability of effector protein to access regions of high chromatin accessibility, degree of uniform enzyme activity across genomic targets, epigenetic tolerance, mismatch/budge tolerance, CRISPR effector stability, CRISPR effector mRNA stability, gRNA stability, CRISPR-Cas or CAST complex stability, CRISPR effector protein or mRNA immunogenicity or toxicity, gRNA immunogenicity or toxicity, CRISPR-Cas complex immunogenicity or toxicity, CRISPR effector protein or mRNA dose or titer, gRNA dose or titer, CRISPR-Cas or CAST complex dose or titer, CRISPR effector protein size, CRISPR effector expression level, gRNA or CAST expression level, CRISPR-Cas complex expression level, CRISPR effector spatiotemporal expression, gRNA spatiotemporal expression, CRISPR-Cas or CAST complex spatiotemporal expression.

[0743] In an aspect, the invention relates to a method as described herein, comprising selecting one or more (therapeutic) target, selecting one or more the functionality of the composition and/or system, selecting one or more CRISPR-Cas or CAST system mode of delivery, selecting one or more delivery vehicle or expression system, and optimization of selected parameters or variables associated with the CRISPR-Cas or CAST system and/or its functionality, wherein specificity, efficacy, and/or safety are optimized, and optionally wherein optimization of specificity comprises optimizing one or more parameters or variables selected from CRISPR effector specificity, gRNA specificity, CRISPR-Cas or CAST complex specificity, PAM restrictiveness, PAM type (natural or modified), PAM nucleotide content, PAM length, wherein optimization of efficacy comprises optimizing one or more parameters or variables selected from CRISPR effector activity, gRNA activity, CRISPR-Cas or CAST complex activity, target cleavage efficiency, target site selection, target sequence length, CRISPR effector protein size, ability of effector protein to access regions of high chromatin accessibility, degree of uniform enzyme activity across genomic targets, epigenetic tolerance, mismatch/budge tolerance, and wherein optimization of safety comprises optimizing one or more parameters or variables selected from CRISPR effector stability, CRISPR effector mRNA stability, gRNA stability, CRISPR-Cas or CAST complex stability, CRISPR effector protein or mRNA immunogenicity or toxicity, gRNA immunogenicity or toxicity, CRISPR-Cas or CAST complex immunogenicity or toxicity, CRISPR effector protein or mRNA dose or titer, gRNA dose or titer, CRISPR-Cas or CAST complex dose or titer, CRISPR effector expression level, gRNA expression level, CRISPR-Cas or CAST complex expression level, CRISPR effector spatiotemporal expression, gRNA spatiotemporal expression, CRISPR-Cas or CAST complex spatiotemporal expression.

[0744] In an aspect, the invention relates to a method as described herein, comprising optionally selecting one or more (therapeutic) target, optionally selecting one or more the functionality of the composition and/or system, optionally selecting one or more mode of delivery, optionally selecting one or more delivery vehicle or expression system, and optimization of selected parameters or variables associated with the system and/or its functionality, wherein specificity, efficacy, and/or safety are optimized, and optionally wherein optimization of specificity comprises optimizing one or more parameters or variables selected from CRISPR effector specificity, gRNA specificity, CRISPR-Cas or CAST complex specificity, PAM restrictiveness, PAM type (natural or modified), PAM nucleotide content, PAM length, wherein optimization of efficacy comprises optimizing one or more parameters or variables selected from CRISPR effector activity, gRNA activity, CRISPR-Cas or CAST complex activity, target cleavage efficiency, target site selection, target sequence length, CRISPR effector protein size, ability of effector protein to access regions of high chromatin accessibility, degree of uniform enzyme activity across genomic targets, epigenetic tolerance, mismatch/budge tolerance, and wherein optimization of safety comprises optimizing one or more parameters or variables selected from CRISPR effector stability, CRISPR effector mRNA stability, gRNA stability, CRISPR-Cas complex stability, CRISPR effector protein or mRNA immunogenicity or toxicity, gRNA immunogenicity or toxicity, CRISPR-Cas complex immunogenicity or toxicity, CRISPR effector protein or mRNA dose or titer, gRNA dose or titer, CRISPR-Cas or CAST complex dose or titer, CRISPR effector expression level, gRNA expression level, CRISPR-Cas or CAST complex expression level, CRISPR effector spatiotemporal expression, gRNA spatiotemporal expression, CRISPR-Cas complex spatiotemporal expression.

[0745] In an aspect, the invention relates to a method as described herein, comprising optimization of selected parameters or variables associated with the system and/or its functionality, wherein specificity, efficacy, and/or safety are optimized, and optionally wherein optimization of specificity comprises optimizing one or more parameters or variables selected from CRISPR effector specificity, gRNA specificity, CRISPR-Cas or CAST complex specificity, PAM restrictiveness, PAM type (natural or modified), PAM nucleotide content, PAM length, wherein optimization of efficacy comprises optimizing one or more parameters or variables selected from CRISPR effector activity, gRNA activity, CRISPR-Cas or CAST complex activity, target cleavage efficiency, target site selection, target sequence length, CRISPR effector protein size, ability of effector protein to access regions of high chromatin accessibility, degree of uniform enzyme activity across genomic targets, epigenetic tolerance, mismatch/budge tolerance, and wherein optimization of safety comprises optimizing one or more parameters or variables selected from CRISPR effector stability, CRISPR effector mRNA stability, gRNA stability, CRISPR-Cas complex stability, CRISPR effector protein or mRNA immunogenicity or toxicity, gRNA immunogenicity or toxicity, CRISPR-Cas or CAST complex immunogenicity or toxicity, CRISPR effector protein or mRNA dose or titer, gRNA dose or titer, CRISPR-Cas or CAST complex dose or titer, CRISPR effector expression level, gRNA expression level, CRISPR-Cas or CAST complex expression level, CRISPR effector spatiotemporal expression, gRNA spatiotemporal expression, CRISPR-Cas or CAST complex spatiotemporal expression.

[0746] It will be understood that the parameters or variables to be optimized as well as the nature of optimization may depend on the (therapeutic) target, the functionality of the composition and/or system, the system mode of delivery, and/or the CRISPR-Cas system delivery vehicle or expression system.

[0747] In an aspect, the invention relates to a method as described herein, comprising optimization of gRNA specificity at the population level. Preferably, said optimization of gRNA specificity comprises minimizing gRNA target site sequence variation across a population and/or minimizing gRNA off-target incidence across a population.

[0748] In an embodiment, optimization can result in selection of a CRISPR-Cas effector that is naturally occurring or is modified. In an embodiment, optimization can result in selection of a CRISPR-Cas effector that has nuclease, nickase, deaminase, transposase, and/or has one or more effector functionalities deactivated or eliminated. In an embodiment, optimizing a PAM specificity can include selecting a CRISPR-Cas effector with a modified PAM specificity. In an embodiment, optimizing can include selecting a CRISPR-Cas effector having a minimal size. In an embodiment, optimizing effector protein stability comprises selecting an effector protein having a short half-life while maintaining sufficient activity, such as by selecting an appropriate CRISPR effector orthologue having a specific half-life or stability. In an embodiment, optimizing immunogenicity or toxicity comprises minimizing effector protein immunogenicity or toxicity by protein modifications. In an embodiment, optimizing functional specific comprises selecting a protein effector with reduced tolerance of mismatches and/or bulges between the guide RNA and one or more target loci.

[0749] In an embodiment, optimizing efficacy comprises optimizing overall efficiency, epigenetic tolerance, or both. In an embodiment, maximizing overall efficiency comprises selecting an effector protein with uniform enzyme activity across target loci with varying chromatin complexity, selecting an effector protein with enzyme activity limited to areas of open chromatin accessibility. In an embodiment, chromatin accessibility is measured using one or more of ATAC-seq, or a DNA-proximity ligation assay. In an embodiment, optimizing epigenetic tolerance comprises optimizing methylation tolerance, epigenetic mark competition, or both. In an embodiment, optimizing methylation tolerance comprises selecting an effector protein that modify methylated DNA. In an embodiment, optimizing epigenetic tolerance comprises selecting an effector protein unable to modify silenced regions of a chromosome, selecting an effector protein able to modify silenced regions of a chromosome, or selecting target loci not enriched for epigenetic markers.

[0750] In an embodiment, selecting an optimized guide RNA comprises optimizing gRNA stability, gRNA immunogenicity, or both, or other gRNA associated parameters or variables as described herein elsewhere.

[0751] In an embodiment, optimizing gRNA stability and/or gRNA immunogenicity comprises RNA modification, or other gRNA associated parameters or variables as described herein elsewhere. In an embodiment, the modification comprises removing 1-3 nucleotides form the 3′ end of a target complementarity region of the gRNA. In an embodiment, modification comprises an extended gRNA and/or trans RNA/DNA element that create stable structures in the gRNA that compete with gRNA base pairing at a target of off-target loci, or extended complimentary nucleotides between the gRNA and target sequence, or both.

[0752] In an embodiment, the mode of delivery comprises delivering gRNA and/or CRISPR effector protein, delivering gRNA and/or CRISPR effector mRNA, or delivery gRNA and/or CRISPR effector as a DNA based expression system. In an embodiment, the mode of delivery further comprises selecting a delivery vehicle and/or expression systems from the group consisting of liposomes, lipid particles, nanoparticles, biolistics, or viral-based expression/delivery systems. In an embodiment, expression is spatiotemporal expression is optimized by choice of conditional and/or inducible expression systems, including controllable CRISPR effector activity optionally a destabilized CRISPR effector and/or a split CRISPR effector, and/or cell- or tissue-specific expression system.

[0753] The methods as described herein may further involve selection of the mode of delivery. In an embodiment, gRNA (and tracr, if and where needed, optionally provided as a sgRNA) and/or CRISPR effector protein are or are to be delivered. In an embodiment, gRNA (and tracr, if and where needed, optionally provided as a sgRNA) and/or CRISPR effector mRNA are or are to be delivered. In an embodiment, gRNA (and tracr, if and where needed, optionally provided as a sgRNA) and/or CRISPR effector provided in a DNA-based expression system are or are to be delivered. In an embodiment, delivery of the individual system components comprises a combination of the above modes of delivery. In an embodiment, delivery comprises delivering gRNA and/or CRISPR effector protein, delivering gRNA and/or CRISPR effector mRNA, or delivering gRNA and/or CRISPR effector as a DNA based expression system.

[0754] The methods as described herein may further involve selection of the CRISPR-Cas system delivery vehicle and/or expression system. Delivery vehicles and expression systems are described herein elsewhere. By means of example, delivery vehicles of nucleic acids and/or proteins include nanoparticles, liposomes, etc. Delivery vehicles for DNA, such as DNA-based expression systems include for instance biolistics, viral based vector systems (e.g., adenoviral, AAV, lentiviral), etc. the skilled person will understand that selection of the mode of delivery, as well as delivery vehicle or expression system may depend on for instance the cell or tissues to be targeted. In an embodiment, the delivery vehicle and/or expression system for delivering the compositions, systems, or components thereof comprises liposomes, lipid particles, nanoparticles, biolistics, or viral-based expression/delivery systems.

### Considerations for Therapeutic Applications

[0755] A consideration in genome editing therapy is the choice of sequence-specific nuclease, such as a variant of a Cas (e.g., Cas9 and/or Cas12) nuclease. Each nuclease variant may possess its own unique set of strengths and weaknesses, many of which must be balanced in the context of treatment to maximize therapeutic benefit. For a specific editing therapy to be efficacious, a sufficiently high level of modification must be achieved in target cell populations to reverse disease symptoms. This therapeutic modification ‘threshold’ is determined by the fitness of edited cells following treatment and the amount of gene product necessary to reverse symptoms. With regard to fitness, editing creates three potential outcomes for treated cells relative to their unedited counterparts: increased, neutral, or decreased fitness. In the case of increased fitness, corrected cells may be able and expand relative to their diseased counterparts to mediate therapy. In this case, where edited cells possess a selective advantage, even low numbers of edited cells can be amplified through expansion, providing a therapeutic benefit to the patient. Where the edited cells possess no change in fitness, an increase the therapeutic modification threshold can be warranted. As such, significantly greater levels of editing may be needed to treat diseases, where editing creates a neutral fitness advantage, relative to diseases where editing creates increased fitness for target cells. If editing imposes a fitness disadvantage, as would be the case for restoring function to a tumor suppressor gene in cancer cells, modified cells would be outcompeted by their diseased counterparts, causing the benefit of treatment to be low relative to editing rates. This may be overcome with supplemental therapies to increase the potency and/or fitness of the edited cells relative to the diseased counterparts.

[0756] In addition to cell fitness, the amount of gene product necessary to treat disease can also influence the minimal level of therapeutic genome editing that can treat or prevent a disease or a symptom thereof. In cases where a small change in the gene product levels can result in significant changes in clinical outcome, the minimal level of therapeutic genome editing is less relative to cases where a larger change in the gene product levels is needed to gain a clinically relevant response. In an embodiment, the minimal level of therapeutic genome editing can range from 0.1 to 1%, 1-5%, 5-10%, 10-15%, 15-20%, 20-25%, 25-30%, 30-35%, 35-40%, 40-45%. 45-50%, or 50-55%. Thus, where a small change in gene product levels can influence clinical outcomes and diseases where there is a fitness advantage for edited cells, are ideal targets for genome editing therapy, as the therapeutic modification threshold is low enough to permit a high chance of success.

[0757] The activity of NHEJ and HDR DSB repair can vary by cell type and cell state. NHEJ is not highly regulated by the cell cycle and is efficient across cell types, allowing for high levels of gene disruption in accessible target cell populations. In contrast, HDR acts primarily during S/G2 phase, and is therefore restricted to cells that are actively dividing, limiting treatments that require precise genome modifications to mitotic cells [Ciccia, A. & Elledge, S. J. Molecular cell 40, 179-204 (2010); Chapman, J. R., et al. Molecular cell 47, 497-510 (2012)].

[0758] The efficiency of correction via HDR may be controlled by the epigenetic state or sequence of the targeted locus, or the specific repair template configuration (single vs. double stranded, long vs. short homology arms) used [Hacein-Bey-Abina, S., et al. The New England journal of medicine 346, 1185-1193 (2002); Gaspar, H. B., et al. Lancet 364, 2181-2187 (2004); Beumer, K. J., et al. G3 (2013)]. The relative activity of NHEJ and HDR machineries in target cells may also affect gene correction efficiency, as these pathways may compete to resolve DSBs [Beumer, K. J., et al. Proceedings of the National Academy of Sciences of the United States of America 105, 19821-19826 (2008)]. HDR also imposes a delivery challenge not seen with NHEJ strategies, as it uses the concurrent delivery of nucleases and repair templates. Thus, these differences can be kept in mind when designing, optimizing, and/or selecting a CRISPR-Cas based therapeutic as described in greater detail elsewhere herein.

[0759] CRISPR-Cas- or CAST-based polynucleotide modification application can include combinations of proteins, small RNA molecules, and/or repair templates, and can make, in an embodiment, delivery of these multiple parts substantially more challenging than, for example, traditional small molecule therapeutics. Two main strategies for delivery of compositions, systems, and components thereof have been developed: ex vivo and in vivo. In an embodiment of ex vivo treatments, diseased cells are removed from a subject, edited and then transplanted back into the patient. In other embodiments, cells from a healthy allogeneic donor are collected, modified using a CRISPR-Cas system or component thereof, to impart various functionalities and/or reduce immunogenicity, and administered to an allogeneic recipient in need of treatment. Ex vivo editing has the advantage of allowing the target cell population to be well defined and the specific dosage of therapeutic molecules delivered to cells to be specified. The latter consideration may be particularly important when off-target modifications are a concern, as titrating the amount of nuclease may decrease such mutations (Hsu et al., 2013). Another advantage of ex vivo approaches is the typically high editing rates that can be achieved, due to the development of efficient delivery systems for proteins and nucleic acids into cells in culture for research and gene therapy applications.

[0760] In vivo polynucleotide modification via compositions, systems, and/or components thereof involves direct delivery of the compositions, systems, and/or components thereof to cell types in their native tissues. In vivo polynucleotide modification via compositions, systems, and/or components thereof allows diseases in which the affected cell population is not amenable to ex vivo manipulation to be treated. Furthermore, delivering compositions, systems, and/or components thereof to cells in situ allows for the treatment of multiple tissue and cell types.

[0761] In an embodiment, such as those where viral vector systems are used to generate viral particles to deliver the CRISPR-Cas system and/or component thereof to a cell, the total cargo size of the CRISPR-Cas system and/or component thereof should be considered as vector systems can have limits on the size of a polynucleotide that can be expressed therefrom and/or packaged into cargo inside of a viral particle. In an embodiment, the tropism of a vector system, such as a viral vector system, should be considered as it can impact the cell type to which the CRISPR-Cas system or component thereof can be efficiently and/or effectively delivered.

[0762] When delivering a system or component thereof via a viral-based system, it can be important to consider the amount of viral particles that will be needed to achieve a therapeutic effect so as to account for the potential immune response that can be elicited by the viral particles when delivered to a subject or cell(s). When delivering a system or component thereof via a viral based system, it can be important to consider mechanisms of controlling the distribution and/or dosage of the system in vivo. Generally, to reduce the potential for off-target effects, it is optimal but not necessarily required, that the amount of the system be as close to the minimum or least effective dose. In practice this can be challenging to do.

[0763] In an embodiment, it can be important to consider the immunogenicity of the system or component thereof. In embodiments, where the immunogenicity of the system or component thereof is of concern, the immunogenicity system or component thereof can be reduced. By way of example only, the immunogenicity of the system or component thereof can be reduced using the approach set out in Tangri et al. Accordingly, directed evolution or rational design may be used to reduce the immunogenicity of the CRISPR enzyme in the host species (human or other species).

### Kits

[0764] In another aspect, the present disclosure provides kit and kit of parts. The terms “kit of parts” and “kit” as used throughout this specification refer to a product containing components necessary for carrying out the specified methods (e.g., methods for detecting, quantifying or isolating immune cells as taught herein), packed so as to allow their transport and storage. Materials suitable for packing the components comprised in a kit include crystal, plastic (e.g., polyethylene, polypropylene, polycarbonate), bottles, flasks, vials, ampules, paper, envelopes, or other types of containers, carriers or supports. Where a kit comprises a plurality of components, at least a subset of the components (e.g., two or more of the plurality of components) or all of the components may be physically separated, e.g., comprised in or on separate containers, carriers or supports. The components comprised in a kit may be sufficient or may not be sufficient for carrying out the specified methods, such that external reagents or substances may not be necessary or may be necessary for performing the methods, respectively. Typically, kits are employed in conjunction with standard laboratory equipment, such as liquid handling equipment, environment (e.g., temperature) controlling equipment, analytical instruments, etc. In addition to the recited binding agents(s) as taught herein, such as for example, antibodies, hybridization probes, amplification and/or sequencing primers, optionally provided on arrays or microarrays, the present kits may also include some or all of solvents, buffers (such as for example but without limitation histidine-buffers, citrate-buffers, succinate-buffers, acetate-buffers, phosphate-buffers, formate buffers, benzoate buffers, TRIS (Tris(hydroxymethyl)-aminomethan) buffers or maleate buffers, or mixtures thereof), enzymes (such as for example but without limitation thermostable DNA polymerase), detectable labels, detection reagents, and control formulations (positive and/or negative), useful in the specified methods. Typically, the kits may also include instructions for use thereof, such as on a printed insert or on a computer readable medium. The terms may be used interchangeably with the term “article of manufacture”, which broadly encompasses any man-made tangible structural product, when used in the present context.

[0765] The present application also provides aspects and embodiments as set forth in the following numbered Statements:

[0766] Statement 1. An engineered system, the system comprising: a. one or more CRISPR-associated Tn7 transposase polypeptides; b. one or more Type I-B Cas proteins; and c. a guide molecule capable of complexing with the Type I-B Cas protein and directing binding of the guide-Cas protein complex to a target polynucleotide.

[0767] Statement 2. The system of Statement 1, wherein the one or more CRISPR-associated Tn7 transposase polypeptides comprise TnsA, TnsB, TnsC, and/or TniQ.

[0768] Statement 3. The system of any one of the proceeding Statements, wherein the Tn7 transposase polypeptides comprise TnsA, TnsB, TnsC, a first TniQ and a second TniQ, wherein the first and second TniQ are different.

[0769] Statement 4. The system of any one of the proceeding Statements, wherein the Tn7 transposase polypeptides comprise comprises TnsA, TnsB, TnsC, and a TniQ.

[0770] Statement 5. The system of Statement 4, wherein the TniQ comprises a DNA-binding domain.

[0771] Statement 6. The system of Statement 5, wherein the DNA-binding domain is at C-terminus of the TniQ.

[0772] Statement 7. The system of any one of the proceeding Statements, wherein the one or more CRISPR-associated Tn7 transposase polypeptides comprise TnsA, TnsB, TnsC, and/or TnsD.

[0773] Statement 8. The system of Statement 7, wherein the Tn7 transposase polypeptides comprise TnsA, TnsB, TnsC, a first TnsD and a second TnsD, wherein the first and second TnsD are different.

[0774] Statement 9. The system of Statement 7, wherein the Tn7 transposase comprises TnsA, TnsB, TnsC and a TnsD.

[0775] Statement 10. The system of Statement 9, wherein the TnsD comprises a DNA-binding domain.

[0776] Statement 11. The system of Statement 9 or 10, wherein the TnsA and TnsB are comprised in a single protein.

[0777] Statement 12. The system of Statement 9, 10, or 11, wherein the Tn7 transposase comprises: a. TnsA, TnsB, TnsC and TnsD1; b. TnsA, TnsB, TnsC and TnsD2; or c. TnsA, TnsB, TnsC, TnsD, and TnsD2.

[0778] Statement 13. The system of any one of the proceeding Statements, wherein the one or more Type I-B Cas proteins comprises Cas5, Cas6, Cas7, and/or Cas 8.

[0779] Statement 14. The system of any one of the proceeding Statements, wherein the one or more Type I-B Cas proteins comprises Cas 8b.

[0780] Statement 15. The system of Statement 14, wherein the Cas8b is Cas8b3.

[0781] Statement 16. The system of any one of the proceeding Statements, wherein the one or more CRISPR-associated Tn7 transposase polypeptides and/or the one or more Type I-B Cas proteins are from or originated from Anabaena variabilis.

[0782] Statement 17. The system of any one of the proceeding Statements, wherein the one or more Type I-B Cas proteins lacks nuclease activity.

[0783] Statement 18. The system of any one of the proceeding Statements, further comprising a donor polynucleotide.

[0784] Statement 19. The system of Statement 18, wherein the donor polynucleotide comprises a polynucleotide insert, a left element sequence, and a right element sequence.

[0785] Statement 20. The system of Statement 18 or 19, wherein the donor polynucleotide: a. introduces one or more mutations to the target polynucleotide; b. corrects a premature stop codon in the target polynucleotide; c. disrupts a splicing site; d. restores a splicing site; or e. a combination thereof.

[0786] Statement 21. The system of Statement 20, wherein the one or more mutations introduced by the donor polynucleotide comprises substitutions, deletions, insertions, or a combination thereof.

[0787] Statement 22. The system of Statement 20 or 21, wherein the one or more mutations causes a shift in an open reading frame on the target polynucleotide.

[0788] Statement 23. The system of any one of Statements 18-22, wherein the donor polynucleotide is between 100 bases and 30 kb in length.

[0789] Statement 24. The system of any one of the proceeding Statements, wherein the target polynucleotide comprises a protospacer adjacent motif (PAM).

[0790] Statement 25. The system of Statement 24, wherein the PAM is AT or ATG.

[0791] Statement 26. The system of Statement 25, wherein the donor polynucleotide is inserted to the target polynucleotide at a site no more than 80, no more 90, no more 100, no more 200, or no more 300 bp 3′ of the PAM.

[0792] Statement 27. The system of Statement 25 or 26, wherein the donor polynucleotide is inserted to the target polynucleotide at a site no more than 80, no more 90, no more 100, no more 200, or no more 300 bp 5′ of the PAM.

[0793] Statement 28. The system of any one of the proceeding Statements, wherein the target polynucleotide is linear, circular, or genomic DNA.

[0794] Statement 29. The system of any one of the proceeding Statements, wherein the one or more Tn7 transposase polypeptides is derived from a first species and the one or more Type I-B Cas proteins is derived from a second species different from the first species.

[0795] Statement 30. The system of Statement 29, comprising a first TnsD1 derived from the first species and a second TnsD2 derived from the second species.

[0796] Statement 31. The system of any one of the proceeding Statements, wherein the one or more Tn7 transposase polypeptides comprises a transposase with activity of TnsA and TnsB.

[0797] Statement 32. The system of any one of the proceeding Statements, further comprising a targeting moiety.

[0798] Statement 33. The system of any one of the proceeding Statements, which comprises a plurality of guide molecules capable of directing binding of the guide-Cas protein complex to one or more target polynucleotides.

[0799] Statement 34. A system comprising one or more polynucleotides encoding: a. one or more CRISPR-associated Tn7 transposase polypeptides; b. one or more Type I-B Cas proteins; and c. a guide molecule capable of complexing with the Type I-B Cas protein and directing binding of the guide-Cas protein complex to a target polynucleotide.

[0800] Statement 35. The system of Statement 34, further comprising a donor polynucleotide.

[0801] Statement 36. The system of Statement 35, wherein the donor polynucleotide comprises a polynucleotide insert, a left element sequence, and a right element sequence.

[0802] Statement 37. The system of any one of Statements 34-36, comprising one or more polynucleotides or encoded products of the polynucleotides in one or more loci in Table 5.

[0803] Statement 38. The system of any one of Statements 34-37, wherein the one or more polynucleotides encode components (a)-(c) of any one of Statements 1-33.

[0804] Statement 39. The system of any one of Statements 34-38, wherein the one or more Type I-B Cas proteins comprises Cas5, Cas6, Cas7, and/or Cas 8.

[0805] Statement 40. The system of any one of Statements 34-39, wherein the system comprises a first polynucleotide encoding a first Cas6 and a second polynucleotide encoding a second Cas6.

[0806] Statement 41. A vector comprising the one or more polynucleotides of any one of Statements 34-40.

[0807] Statement 42. An engineered cell comprising the system of any one of Statements 1-40, or the vector of Statement 41.

[0808] Statement 43. The engineered cell of Statement 42, wherein the cell produces and/or secretes an endogenous or non-endogenous biological product or chemical compound.

[0809] Statement 44. The engineered cell of Statement 43, wherein the biological product is a protein or an RNA.

[0810] Statement 45. A cell line comprising the engineered cell of any one of Statements 42-44 and progeny thereof.

[0811] Statement 46. A plant or animal model comprising the engineered cell of any one of Statements 42-44 and progeny thereof.

[0812] Statement 47. A composition comprising the engineered cell of any one of Statements 42-44.

[0813] Statement 48. The composition of Statement 47, formulated for use as a therapeutic.

[0814] Statement 49. A biological product or chemical compound produced by the engineered cell of any one of Statements 42-44.

[0815] Statement 50. An engineered cell or progeny thereof, the cell being engineered by use of the system of any one of Statements 1-40.

[0816] Statement 51. The cell or progeny thereof of Statement 50 that is isolated.

[0817] Statement 52. The cell or progeny thereof of Statement 50 or 51 that is further used as a therapeutic.

[0818] Statement 53. The cell or progeny thereof of Statement 50, 51, or 52 from which a product is isolated.

[0819] Statement 54. A product produced by the cell or progeny thereof of Statement 50, 51, or 52.

[0820] Statement 55. The product of Statement 54, wherein the product is a protein or an RNA.

[0821] Statement 56. The protein of Statement 55, wherein the protein comprises a mutation.

[0822] Statement 57. A pharmaceutical composition for treatment of a disease or disorder, comprising the cell or progeny thereof of Statement 50, 51, or 52.

[0823] Statement 58. The pharmaceutical composition according to Statement 57, wherein the treatment results in genetic changes in one or more cells.

[0824] Statement 59. The pharmaceutical composition according to Statement 57 or 58, wherein the treatment results in correction of one or more defective genotypes.

[0825] Statement 60. The pharmaceutical composition according to Statement 57, 58, or 59, wherein the treatment results in improved phenotype.

[0826] Statement 61. The cell or progeny thereof of Statement 50, 51, or 52, wherein the cell comprises a mutation in a protein expressed from a gene comprising the target sequence.

[0827] Statement 62. The cell or progeny thereof of Statement 61, wherein the cell comprises deletion of a genomic region comprising the target sequence.

[0828] Statement 63. The cell or progeny thereof of any one of Statements 61-62, wherein the cell comprises integration of an exogenous sequence by homology-directed repair.

[0829] Statement 64. The cell or progeny thereof of any one of Statements 61-63, wherein the cell comprises decreased transcription of a gene associated with the target sequence.

[0830] Statement 65. The cell or progeny thereof of any one of Statements 61-64, wherein the cell comprises increased transcription of a gene associated with the target sequence.

[0831] Statement 66. The product of Statement 49, wherein the product is a mutated protein or product provided by a template.

[0832] Statement 67. A method of inserting a donor polynucleotide into a target polynucleotide in a cell, the method comprises introducing to the cell: a. one or more CRISPR-associated Tn7 transposase polypeptides or functional fragments thereof; b. one or more Type I-B Cas proteins; and c. a guide molecule capable of complexing with the Type I-B Cas protein and directing binding of the guide-Cas protein complex to a target polynucleotide.

[0833] Statement 68. The method of Statement 67, wherein the donor polynucleotide: a. introduces one or more mutations to the target polynucleotide; b. corrects a premature stop codon in the target polynucleotide; c. disrupts a splicing site; d. restores a splicing site; or e. a combination thereof.

[0834] 69. The method of Statement 68, wherein the one or more mutations introduced by the donor polynucleotide comprises substitutions, deletions, insertions, or a combination thereof.

[0835] Statement 70. The method of Statement 68 or 69, wherein the one or more mutations causes a shift in an open reading frame on the target polynucleotide.

[0836] Statement 71. The method of any one of Statements 67-70, wherein the donor polynucleotide is between 100 bases and 30 kb in length.

[0837] Statement 72. The method of any one of Statements 67-71, wherein one or more of components (a), (b), and (c) is expressed from a nucleic acid operably linked to a regulatory sequence.

[0838] Statement 73. The method of any one of Statements 67-72, wherein one or more of components (a), (b), and (c) is introduced in a particle.

[0839] Statement 74. The method of any one of Statements 67-73, wherein the particle comprises a ribonucleoprotein (RNP).

[0840] Statement 75. The method of any one of Statements 67-74, wherein the cell is a prokaryotic cell.

[0841] Statement 76. The method of any one of Statements 67-74, wherein the cell is a eukaryotic cell.

[0842] Statement 77. The method of any one of Statements 67-74, wherein the cell is a mammalian cell, a cell of a non-human primate, or a human cell.

[0843] Statement 78. The method of any one of Statements 67-74, wherein the cell is a plant cell.

[0844] Statement 79. The method of any one of Statements 67-78, wherein insertion of the donor polynucleotide into the target polynucleotide in the cell results in: a cell or population of cells comprising altered expression levels of one or more gene products; a cell or population of cells that produces and/or secrete an endogenous or non-endogenous biological product or chemical compound.

[0845] Statement 80. The method of any one of Statements 67-79, wherein the donor polynucleotide is inserted to a site no more than 80, no more 90, no more 100, no more 200, or no more 300 bp 3′ of a PAM on the target polynucleotide.

[0846] Statement 81. The method of any one of Statements 67-79, wherein the donor polynucleotide is inserted to a site no more than 80, no more 90, no more 100, no more 200, or no more 300 bp 5′ of a PAM on the target polynucleotide.

[0847] Statement 82. The method of any one of Statements 67-81, wherein the target polynucleotide is linear, circular, or genomic DNA.

### Exemplary CAST Systems

[0848] The Sequences of plasmids for expressing an exemplary Type I-B CAST system from locus CP000117 of Anabaena variabilis ATCC 29413 are shown in Table 6 below.

TABLE 6

| Plasmids | Sequences |
|---|---|
| pCascade_CP000117 | SEQ ID NO: 140 |
| pDonor_CP000117 | SEQ ID NO: 141 |
| pTns_CP000117 | SEQ ID NO: 142 |

[0849] The sequences of the left end (LE) sequence element and right end (RE) sequence element on the pDonor_CP000117 are shown in the Table 7 below.

TABLE 7

| Elements | Sequences |
|---|---|
| LE (pDonor_CP000117 | SEQ ID NO: 143 |
| (962 . . . 1261) (300 bp)) | |
| RE (pDonor_CP000117 | SEQ ID NO: 144 |
| (105 . . . 256) (152 bp)) | |

[0850] The sequence of IB18 locus is shown below.

[0851] IB18-CAST locus (40,895 bp); Accession: 100521|34|GCA_001597855.1_ASM159785v1_genomic|LUHI01000035.1|201628|Anabaena (SEQ ID NO: 145)

[0852] Features of the components in the IB18 locus above, e.g., TnsA, TnsB, TnsC, TniQ (TnsD), Cas5, Cas6, Cas7, Cas8, and CRISPR clusters are shown below.

FEATURES Location/Qualifiers

| | |
|---|---|
| CDS | 265..510 |
| | /product = ″NA >cl_18381″ |
| | /gene = ″NA >cl_18381″ |
| | /locus_tag = ″NA >cl_18381″ |
| | /label = ″NA >cl_18381 CDS″ |
| CDS | 735..2609 |
| | /product = ″NA >cl_19425″ |
| | /gene = ″NA >cl_19425″ |
| | /locus_tag = ″NA >cl_19425″ |
| | /label = ″NA >cl_19425 CDS″ |
| glmS | 735..2609 |
| | /created_by = ″makoto″ |
| | /label = ″glmS″ |
| ITR | 2634..2700 |
| | /created_by = ″makoto″ |
| | /label = ″Right End″ |
| motif_3 | 2642..2660 |
| | /Mismatches = 0 |
| | /%_Identity = 100 |
| | /Motif = ″[AC][AC][TAJAA[AT]AAAGT[TC][AG]TA[CT]AN[TC]″ |
| | /annotation_group = ″AttTn7_cluster_2: 7,354,202 -> 7,354,220″ |
| | /label = ″AttTn7_cluster_2″ |
| motif_3 | 2662..2680 |
| | /Mismatches = 0 |
| | /%_Identity = 100 |
| | /Motif = ″[AC][AC][TAJAA[AT]AAAGT[TC][AG]TA[CT]AN[TC]″ |
| | /annotation_group = ″AttTn7_cluster_2: 7,354,222 -> 7,354,240″ |
| | /label = ″AttTn7_cluster_2″ |
| motif_3 | 2682..2700 |
| | /Mismatches = 1 |
| | /%_Identity = ″94.73684210526316″ |
| | /Motif = ″[AC][AC][TAJAA[AT]AAAGT[TC][AG]TA[CT]AN[TC]″ |
| | /annotation_group = ″AttTn7_cluster_2: 7,354,242 -> 7,354,260″ |
| | /label = ″AttTn7_cluster_2″ |
| tnsA | 2742..3557 |
| | /product = ″1-272\|id:63.235@bs:384″ |
| | /gene = ″1-272\|id:63.235@bs:384″ |
| | /locus_tag = ″1-272\|id:63.235@bs:384″ |
| | /label = ″1-272\|id:63.235@bs:384 tnsA″ |
| CDS | 2742..3560 |
| | /product = ″tnsA_10 >cl_27484″ |
| | /gene = ″tnsA_10 >cl_27484″ |
| | /locus_tag = ″tnsA_10 >c1_27484″ |
| | /label = ″tnsA 10 >cl_27484 CDS″ |
| tnsB | 3581..5809 |
| | /product = ″1-741\|id:67.738@bs:1002″ |
| | /gene = ″1-741\|id:67.738@bs:1002″ |
| | /locus_tag = ″1-741\|id:67.738@bs:1002″ |
| | /label = ″1-741\|id:67.738@bs:1002 tnsB″ |
| CDS | 3581..5812 |
| | /product = ″tnsB_11 >cl_26522″ |
| | /gene = ″tnsB_11 >cl_26522″ |
| | /locus_tag = ″tnsB_11 >cl_26522″ |
| | /label = ″tnsB 11 >cl_26522 CDS″ |
| CDS | 5802..7475 |
| | /product = ″NA >cl_6196″ |
| | /gene = ″NA >cl_6196″ |
| | /locus_tag = ″NA >cl_6196″ |
| | /label = ″NA >cl_6196 CDS″ |
| tnsC | 5832..7472 |
| | /product = ″18-568\|id:62.976@bs:712″ |
| | /gene = ″18-568\|id:62.976@bs:712″ |
| | /locus_tag = ″18-568\|id:62.976@bs:712″ |
| | /label = ″18-568\|id:62.976@bs:712 tnsC″ |
| tniQ | 7483..8445 |
| | /product = ″1-315\|id:40.683@bs:231″ |
| | /gene = ″1-315\|id:40.683@bs:231″ |
| | /locus_tag = ″1-315\|id:40.683@bs:231″ |
| | /label = ″1-315\|id:40.683@bs:231 tniQ″ |
| CDS | 7483..8430 |
| | /product = ″NA >cl_2402″ |
| | /gene = ″NA >cl_2402″ |
| | /locus_tag = ″NA >cl_2402″ |
| | /label = ″NA >cl_2402 CDS″ |
| cas6 | 8603..9283 |
| | /product = ″1-227\|id:90.308@bs:421″ |
| | /gene = ″1-227\|id:90.308@bs:421″ |
| | /locus_tag = ″1-227\|id:90.308@bs:421″ |
| | /label = ″1-227\|id:90.308@bs:421 cas6″ |
| CDS | 8603..9286 |
| | /product = ″NA >cl_11380″ |
| | /gene = ″NA >cl_11380″ |
| | /locus_tag = ″NA >cl_11380″ |
| | /label = ″NA >cl_11380 CDS″ |
| cas8 | 9304..10839 |
| | /product = ″1-512\|id:88.867@bs:952″ |
| | /gene = ″1-512\|id:88.867@bs:952″ |
| | /locus_tag = ″1-512\|id:88.867@bs:952″ |
| | /label = ″1-512\|id:88.867@bs:952 cas8″ |
| CDS | 9307..10803 |
| | /product = ″devT_12>cl_6205″ |
| | /gene = ″devT_12 >cl_6205″ |
| | /locus_tag = ″devT_12 >cl_6205″ |
| | /label = ″devT 12 >cl_6205 CDS″ |
| cas7 | 10901..11872 |
| | /product = ″1-324\|id:90.123@bs:493″ |
| | /gene = ″1-324\|id:90.123@bs:493″ |
| | /locus_tag = ″1-324\|id:90.123@bs:493″ |
| | /label = ″1-324\|id:90.123@bs:493 cas7″ |
| CDS | 10901..11875 |
| | /product = ″devR_22 >cl_17591″ |
| | /gene = ″devR_22 >c1_17591″ |
| | /locus_tag = ″devR_22 >cl_17591″ |
| | /label = ″devR 22 >cl_17591 CDS″ |
| cas5 | 11877..12506 |
| | /product = ″1-210\|id:89.048@bs:396″ |
| | /gene = ″1-210\|id:89.048@bs:396″ |
| | /locus_tag = ″1-210\|id:89.048@bs:396″ |
| | /label = ″1-210\|id:89.048@bs:396 cas5″ |
| CDS | 11877..12509 |
| | /product = ″devS_14 >cl_25717″ |
| | /gene = ″devS_14 >cl_25717″ |
| | /locus_tag = ″devS_14 >cl_25717″ |
| | /label = ″devS 14 >cl_25717 CDS″ |
| CRISPR | complement(12786..13107) |
| | /product = ″5 ACTGCTCAACGTCTAACGACATCTAATGTTAAAGCAC″ (SEQ ID NO: 146) |
| | /gene = ″5 ACTGCTCAACGTCTAACGACATCTAATGTTAAAGCAC″ (SEQ ID NO: 147) |
| | /locus_tag = ″5 ACTGCTCAACGTCTAACGACATCTAATGTTAAAGCAC″ (SEQ ID NO: 148) |
| | /label = ″5 ACTGCTCAACGTCTAACGACATCTAATGTTAAAGCAC CRISPR″ (SEQ ID NO: 149) |
| CDS | complement(13305..13535) |
| | /product = ″NA >cl_2538″ |
| | /gene = ″NA >cl_2538″ |
| | /locus_tag = ″NA >cl_2538″ |
| | /label = ″NA >cl_2538 CDS″ |
| tniQ | 13829..15736 |
| | /product = ″1-636\|id:91.038@bs:1200″ |
| | /gene = ″1-636\|id:91.038@bs:1200″ |
| | /locus_tag = ″1-636\|id:91.038@bs:1200″ |
| | /label = ″1-636\|id:91.038@bs:1200 tniQ″ |
| CDS | 13829..15739 |
| | /product = ″NA >cl_1243″ |
| | /gene = ″NA >cl_1243″ |
| | /locus_tag = ″NA >cl_1243″ |
| | /label = ″NA >cl+1243 CDS″ |
| CDS | complement(15782..16087) |
| | /product = ″NA >cl_14703″ |
| | /gene = ″NA >cl_14703″ |
| | /locus_tag = ″NA >cl_14703″ |
| | /label = ″NA >cl 14703 CDS″ |
| CDS | complement(16245..16538) |
| | /product = ″NA >cl_2353″ |
| | /gene = ″NA >cl_2353″ |
| | /locus_tag = ″NA >cl_2353″ |
| | /label = ″NA >cl 2353 CDS″ |
| CDS | 16744..18837 |
| | /product = ″NA >nocl″ |
| | /gene = ″NA >nocl″ |
| | /locus_tag = ″NA >nocl″ |
| | /label = ″NA >nocl CDS″ |
| CDS | 18834..20024 |
| | /product = ″NA >nocl″ |
| | /gene = ″NA >nocl″ |
| | /locus_tag = ″NA >nocl″ |
| | /label = ″NA >nocl CDS″ |
| CDS | 20158..23391 |
| | /product = ″NA >cl_16927″ |
| | /gene = ″NA >cl_16927″ |
| | /locus_tag = ″NA >cl_16927″ |
| | /label = ″NA >cl 16927 CDS″ |
| CDS | 23553..27491 |
| | /product = ″NA >cl_9573″ |
| | /gene = ″NA >cl_9573″ |
| | /locus_tag = ″NA >cl_9573″ |
| | /label = ″NA >cl 9573 CDS″ |
| CDS | 27481..28449 |
| | /product = ″NA >nocl″ |
| | /gene = ″NA >nocl″ |
| | /locus_tag = ″NA >nocl″ |
| | /label = ″NA >nocl CDS″ |
| CDS | 28501..32973 |
| | /product = ″tolB_48 >cl_2719″ |
| | /gene = ″tolB_48 >cl_2719″ |
| | /locus_tag = ″tolB_48 >cl_2719″ |
| | /label = ″tolB 48 >cl 2719 CDS″ |
| CRISPR | complement(31332..31631) |
| | /product = ″3ATGCCGTCGTTACTTCCTAAAGCCAGCATTGTACCATCGGGGCTAAAGCTAACACTATT T″ |
| | (SEQ ID NO: 150) |
| | /gene = ″3ATGCCGTCGTTACTTCCTAAAGCCAGCATTGTACCATCGGGGCTAAAGCTAACACTATT T″ |
| | (SEQ ID NO: 151) |
| | /locus_tag = ″3ATGCCGTCGTTACTTCCTAAAGCCAGCATTGTACCATCGGGGCTAAAGCTAACACTATT T″ |
| | (SEQ ID NO: 152) |
| | /label = ″3ATGCCGTCGTTACTTCCTAAAGCCAGCATTGTACCATCGGGGCTAAAGCTAACACTATT T CRISPR″ |
| | (SE QID NO: 153) |
| CDS | 33003..37379 |
| | /product = ″tolB_47>cl_2719″ |
| | /gene = ″tolB_47 >cl 2719″ |
| | /locus_tag = ″tolB_47 >cl_2719″ |
| | /label = ″tolB 47 >cl 2719 CDS″ |
| ITR | complement(37722..37859) |
| | /created_by = ″makoto″ |
| | /modified_by = ″makoto″ |
| | /label = ″Left End″ |
| motif_3 | complement(37722..37740) |
| | /Mismatches = 0 |
| | /%_Identity = 100 |
| | /Motif = ″[AC][AC][TA]AA[AT]AAAGT[TC][AG]TA[CT]AN[TC]″ |
| | /annotation_group = ″AttTn7_cluster_2: 7,389,282 <- 7,389,300″ |
| | /label = ″AttTn7_cluster_2″ |
| motif_3 | complement(37766..37784) |
| | /Mismatches = 0 |
| | /%_Identity = 100 |
| | /Motif = ″[AC][AC][TAJAA[AT]AAAGT[TC][AG]TA[CT]AN[TC]″ |
| | /annotation_group = ″AttTn7_cluster_2: 7,389,326 <- 7,389,344″ |
| | /label = ″AttTn7_cluster_2″ |
| motif_3 | complement(37833..37851) |
| | /Mismatches = 1 |
| | /%_Identity = ″94.73684210526316″ |
| | /Motif = ″[AC][AC][TAJAA[AT]AAAGT[TC][AG]TA[CT]AN[TC]″ |
| | /annotation_group = ″AttTn7_cluster_2: 7,389,393 <- 7,389,411″ |
| | /label = ″AttTn7 cluster 2″ |
| CDS | 38005..39951 |
| | /product = ″NA >c1 7816″ |
| | /gene = ″NA >cl 7816″ |
| | /locus_tag = ″NA >cl 7816″ |
| | /label = ″NA >cl 7816 CDS″ |
| CDS | complement(40055..40459) |
| | /product = ″NA >cl 13569″ |
| | /gene = ″NA >cl 13569″ |
| | /locus_tag = ″NA >cl_13569″ |
| | /label = ″NA >cl 13569 CDS″ |
| CDS | complement(40466..40681) |
| | /product = ″NA >nocl″ |
| | /gene = ″NA >nocl″ |
| | /locus_tag = ″NA >nocl″ |
| | /label = ″NA >nocl CDS″ |

[0853] The map of IB28 locus is shown in FIG. 54. The sequence of IB28 locus is shown below. IB28-CAST locus (39.833 bp): Accession: 133464|0|GCA_002368215.1_ASM236821v1_genomic|AP018184.1|6522801|Nostoc (SEQ ID) NO: 154)

[0854] Features of the components in the IB28 locus above, e.g., TnsA, TnsB, TnsC, TniQ (TnsD), Cas5, Cas6, Cas7, Cas8, and CRISPR clusters are shown below.

FEATURES Location/Qualifiers

| | |
|---|---|
| glmS | 159..2033 |
| | /created_by = ″makoto″ |
| | /label = ″glmS″ |
| CDS | 159..2033 |
| | /product = ″NA >cl_19425″ |
| | /gene = ″NA >cl_19425″ |
| | /locus_tag = ″NA >cl_19425″ |
| | /label = ″NA >cl 19425 CDS″ |
| ITR | 2058..2124 |
| | /created_by = ″makoto″ |
| | /label = ″RE″ |
| motif 3 | 2066..2084 |
| | /Mismatches = 0 |
| | /%_Identity = 100 |
| | /Motif = ″[ATC][AC][AT]AA[AT]AAAGTT[GC]TA[CT]AAT″ |
| | /annotation_group = ″AttTn7_cluster_3: 11,075,376 -> 11,075,394″ |
| | /label = ″AttTn7_cluster 3″ |
| motif_3 | 2086..2104 |
| | /Mismatches = 0 |
| | /%_Identity = 100 |
| | /Motif = ″[ATC][AC][AT]AA[AT]AAAGTT[GC]TA[CT]AAT″ |
| | /annotation_group = ″AttTn7_cluster_3: 11,075,396 -> 11,075,414″ |
| | /label = ″AttTn7_cluster_3″ |
| motif_3 | 2106..2124 |
| | /Mismatches = 1 |
| | /%_Identity = ″94.73684210526316″ |
| | /Motif = ″[ATC][AC][AT]AA[AT]AAAGTT[GC]TA[CT]AAT″ |
| | /annotation_group = ″AttTn7_cluster_3: 11,075,416 -> 11,075,434″ |
| | /label = ″AttTn7_cluster_3″ |
| tnsA | 2170..2985 |
| | /product = ″1-272\|id:62.500@bs:371″ |
| | /gene = ″1-272\|id:62.500@bs:371″ |
| | /locus_tag = ″1-272\|id:62.500@bs:371″ |
| | /label = ″1-272\|id:62.500@bs:371 tnsA″ |
| CDS | 2170..2988 |
| | /product = ″tnsA_13 >cl 27484″ |
| | /gene = ″tnsA_13 >cl_27484″ |
| | /locus_tag = ″tnsA_13 >cl_27484″ |
| | /label = ″tnsA 13 >cl 27484 CDS″ |
| tnsB | 3010..5232 |
| | /product = ″1-742\|id:67.564@bs:1041″ |
| | /gene = ″1-742\|id:67.564@bs:1041″ |
| | /locus_tag = ″1-742\|id:67.564@bs:1041″ |
| | /modified_by = ″makoto″ |
| | /label = ″29-B 1-742\|id:67.564@bs:1041 tnsB″ |
| CDS | 3010..5238 |
| | /product = ″tnsB_14 >cl_26522″ |
| | /gene = ″tnsB_14 >cl_26522″ |
| | /locus_tag = ″tnsB_14 >cl_26522″ |
| | /label = ″tnsB 14 >cl 26522 CDS″ |
| tnsC | 5207..6904 |
| | /product = ″2-568\|id:59.331@bs:688″ |
| | /gene = ″2-568\|id:59.331@bs:688″ |
| | /locus_tag = ″2-568\|id:59.331@bs:688″ |
| | /label = ″2-568\|id:59.331@bs:688 tnsC″ |
| CDS | 5222..6910 |
| | /product = ″NA >cl_6196″ |
| | /gene = ″NA >cl_6196″ |
| | /locus_tag = ″NA >cl_6196″ |
| | /label = ″NA >c1 6196 CDS″ |
| tniQ | 6915..7868 |
| | /product = ″1-309\|id:25.731@bs:85.1″ |
| | /gene = ″1-309\|id:25.731@bs:85.1″ |
| | /locus_tag = ″1-309\|id:25.731@bs:85.1″ |
| | /label = ″1-309\|id:25.731@bs:85.1 tniQ″ |
| CDS | 6915..7862 |
| | /product = ″NA >cl_2402″ |
| | /gene = ″NA >cl 2402″ |
| | /locus_tag = ″NA >cl_2402″ |
| | /label = ″NA >cl 2402 CDS″ |
| CDS | 8023..8691 |
| | /product = ″NA >cl_11380″ |
| | /gene = ″NA >cl_11380″ |
| | /locus_tag = ″NA >cl_11380″ |
| | /label = ″NA >cl 11380 CDS″ |
| cas6 | 8047..8688 |
| | /product = ″15-227\|id:63.084@bs:281″ |
| | /gene = ″15-227\|id:63.084@bs:281″ |
| | /locus_tag = ″15-227\|id:63.084@bs:281″ |
| | /label = ″15-227\|id:63.084@bs:281 cas6″ |
| cas8 | 8709..10238 |
| | /product = ″1-512\|id:64.453@bs:696″ |
| | /gene = ″1-512\|id:64.453@bs:696″ |
| | /locus_tag = ″1-512\|id:64.453@bs:696″ |
| | /label = ″1-512\|id:64.453@bs:696 cas8″ |
| CDS | 8709..10241 |
| | /product = ″devT_19 >cl_6205″ |
| | /gene = ″devT_19>cl_6205″ |
| | /locus_tag = ″devT_19 >cl_6205″ |
| | /label = ″devT 19 >c1 6205 CDS″ |
| cas7 | 10299..11294 |
| | /product = ″1-324\|id:74.096@bs:433″ |
| | /gene = ″1-324\|id:74.096@bs:433″ |
| | /locus_tag = ″1-324\|id:74.096@bs:433″ |
| | /label = ″1-324\|id:74.096@bs:433 cas7″ |
| CDS | 10299..11297 |
| | /product = ″devR_31 >cl_17591″ |
| | /gene = ″devR_31 >cl_17591″ |
| | /locus_tag = ″devR_31 >cl_17591″ |
| | /label = ″devR 31 >c1 17591 CDS″ |
| cas5 | 11299..11928 |
| | /product = ″1-210\|id:87.619@bs:390″ |
| | /gene = ″1-210\|id:87.619@bs:390″ |
| | /locus_tag = ″1-210\|id:87.619@bs:390″ |
| | /label = ″1-210\|id:87.619@bs:390 cas5″ |
| CDS | 11299..11931 |
| | /product = ″devS_23 >c1_25717″ |
| | /gene = ″devS_23 >c1_25717″ |
| | /locus_tag = ″devS_23 >cl_25717″ |
| | /label = ″devS 23 >cl 25717 CDS″ |
| CRISPR | complement(12210..12538) |
| | /product = ″5 CTGCTCAACGCCTAATGGCATCTAATGTTGAAGCAC″ (SEQ ID NO: 155) |
| | /gene = ″5 CTGCTCAACGCCTAATGGCATCTAATGTTGAAGCAC″ (SEQ ID NO: 156) |
| | /locus_tag = ″5 CTGCTCAACGCCTAATGGCATCTAATGTTGAAGCAC″ (SEQ ID NO: 157) |
| | /label = ″5 CTGCTCAACGCCTAATGGCATCTAATGTTGAAGCAC CRISPR″ (SEQ ID NO: 158) |
| CDS | complement(12759..12989) |
| | /product = ″NA >cl_2538″ |
| | /gene = ″NA >cl_2538″ |
| | /locus_tag = ″NA >cl_2538″ |
| | /label = ″NA >cl 2538 CDS″ |
| CRISPR | complement(13076..13127) |
| | /product = ″2 AGGCATTACACAATAC″ (SEQ ID NO: 159) |
| | /gene = ″2 AGGCATTACACAATAC″ (SEQ ID NO: 160) |
| | /locus_tag = ″2 AGGCATTACACAATAC″ (SEQ ID NO: 161) |
| | /label = ″2 AGGCATTACACAATAC CRISPR″ (SEQ ID NO: 162) |
| tniQ | 13283..15190 |
| | /product = ″1-636\|id:91.352@bs:1195″ |
| | /gene = ″1-636\|id:91.352@bs:1195″ |
| | /locus_tag = ″1-636\|id:91.352@bs:1195″ |
| | /label = ″1-636\|id:91.352@bs:1195 tniQ″ |
| CDS | 13283..15193 |
| | /product = ″NA >cl_1243″ |
| | /gene = ″NA >cl_1243″ |
| | /locus_tag = ″NA >cl_1243″ |
| | /label = ″NA >cl 1243 CDS″ |
| CDS | complement(15236..15541) |
| | /product = ″NA >cl_14703″ |
| | /gene = ″NA >cl_14703″ |
| | /locus_tag = ″NA >cl_14703″ |
| | /label = ″NA >cl 14703 CDS″ |
| CDS | complement(15672..15965) |
| | /product = ″NA >cl_2353″ |
| | /gene = ″NA >cl_2353″ |
| | /locus_tag = ″NA >cl_2353″ |
| | /label = ″NA >c1 2353 CDS″ |
| CDS | 16481..17014 |
| | /product = ″NA >nocl″ |
| | /gene = ″NA >nocl″ |
| | /locus_tag = ″NA >nocl″ |
| | /label = ″NA >nocl CDS″ |
| CDS | 17020..17835 |
| | /product = ″NA >nocl″ |
| | /gene = ″NA >nocl″ |
| | /locus_tag = ″NA >nocl″ |
| | /label = ″NA >nocl CDS″ |
| CDS | 17819..18385 |
| | /product = ″NA >nocl″ |
| | /gene = ″NA >nocl″ |
| | /locus_tag = ″NA >nocl″ |
| | /label = ″NA >nocl CDS″ |
| CDS | 18385..22101 |
| | /product = ″NA >nocl″ |
| | /gene = ″NA >nocl″ |
| | /locus_tag = ″NA >nocl″ |
| | /label = ″NA >nocl CDS″ |
| CDS | 22104..26417 |
| | /product = ″NA >nocl″ |
| | /gene = ″NA >nocl″ |
| | /locus_tag = ″NA >nocl″ |
| | /label = ″NA >nocl CDS″ |
| CDS | 26417..27772 |
| | /product = ″NA >nocl″ |
| | /gene = ″NA >nocl″ |
| | /locus_tag = ″NA >nocl″ |
| | /label = ″NA >nocl CDS″ |
| CDS | 27863..28972 |
| | /product = ″NA >nocl″ |
| | /gene = ″NA >nocl″ |
| | /locus_tag = ″NA >nocl″ |
| | /label = ″NA >nocl CDS″ |
| CDS | 28983..31016 |
| | /product = ″NA >nocl″ |
| | /gene = ″NA >nocl″ |
| | /locus_tag = ″NA >nocl″ |
| | /label = ″NA >nocl CDS″ |
| CDS | 31850..33103 |
| | /product = ″NA >nocl″ |
| | /gene = ″NA >nocl″ |
| | /locus_tag = ″NA >nocl″ |
| | /label = ″NA >nocl CDS″ |
| CDS | 33094..34188 |
| | /product = ″NA >nocl″ |
| | /gene = ″NA >nocl″ |
| | /locus_tag = ″NA >nocl″ |
| | /label = ″NA >nocl CDS″ |
| CDS | 36966..38672 |
| | /product = ″NA >nocl″ |
| | /gene = ″NA >nocl″ |
| | /locus_tag = ″NA >nocl″ |
| | /label = ″NA >nocl CDS″ |
| ITR | complement(38849..38987) |
| | /created_by = ″makoto″ |
| | /label = ″Left End″ |
| motif_3 | complement(38849..38867) |
| | /Mismatches = 0 |
| | /%_Identity = 100 |
| | /Motif = ″[ATC][AC][AT]AA[AT]AAAGTT[GC]TA[CT]AAT″ |
| | /annotation_group = ″AttTn7_cluster_3: 11,112,159 <- 11,112,177″ |
| | /label = ″AttTn7_cluster_3″ |
| motif_3 | complement(38893..38911) |
| | /Mismatches = 0 |
| | /%_Identity = 100 |
| | /Motif = ″[ATC][AC][AT]AA[AT]AAAGTT[GC]TA[CT]AAT″ |
| | /annotation_group = ″AttTn7_cluster_3: 11,112,203 <- 11,112,221″ |
| | /label = ″AttTn7_cluster_3″ |
| motif_3 | complement(38961..38979) |
| | /Mismatches = 0 |
| | /%_Identity = 100 |
| | /Motif = ″[ATC][AC][AT]AA[AT]AAAGTT[GC]TA[CT]AAT″ |
| | /annotation_group = ″AttTn7_cluster_3: 11,112,271 <- 11,112,289″ |
| | /label = ″AttTn7_cluster_3″ |
| CDS | complement(39114..39809) |
| | /product = ″NA >nocl″ |
| | /gene = ″NA >nocl″ |
| | /locus_tag = ″NA >nocl″ |
| | /label = ″NA >nocl CDS″ |
| CDS | complement(39813..>39833) |
| | /product = ″NA >nocl″ |
| | /gene = ″NA >nocl″ |
| | /locus_tag = ″NA >nocl″ |
| | /label = ″NA >nocl CDS″ |

[0855] An exemplary CAST system IB20 was previously characterized. The plasmids and relevant sequences are summarized below.

TABLE 8

| | Expression | Expression |
|---|---|---|
| | cassette | cassette |
| Plasmids | sequences | Maps |
| IB20_pCMV-Cas5-NLS-HA | Cas5-NLS-HA: | Cas5-NLS-HA: |
| | SEQ ID NO: 163 | FIG. 73 |
| IB20_pCMV-Cas6-NLS-HA | Cas6-NLS-HA: | Cas6-NLS-HA: |
| | SEQ ID NO: 164 | FIG. 75 |
| IB20_pCMV-Cas7-NLS-HA | Cas7-NLS-HA: | Cas7-NLS-HA: |
| | SEQ ID NO: 165 | FIG. 77 |
| IB20_pCMV-Cas8-NLS-HA | Cas8-NLS-HA: | Cas8-NLS-HA: |
| | SEQ ID NO: 166 | FIG. 79 |
| IB20_pCMV-HA-NLS-Cas5 | HA-NLS-Cas5: | HA-NLS-Cas5: |
| | SEQ ID NO: 167 | FIG. 81 |
| IB20_pCMV-HA-NLS-Cas6 | HA-NLS-Cas6: | HA-NLS-Cas6: |
| | SEQ ID NO: 168 | FIG. 83 |
| IB20_pCMV-HA-NLS-Cas7 | HA-NLS-Cas7: | HA-NLS-Cas7: |
| | SEQ ID NO: 169 | FIG. 85 |
| IB20_pCMV-HA-NLS-Cas8 | HA-NLS-Cas8: | HA-NLS-Cas8: |
| | SEQ ID NO: 170 | FIG. 87 |
| IB20_pCMV-HA-NLS-TniQ1 | HA-NLS-TniQ1: | HA-NLS-TniQ1: |
| | SEQ ID NO: 171 | FIG. 89 |
| IB20_pCMV-HA-NLS-TniQ2 | HA-NLS-TniQ2 | HA-NLS-TniQ2: |
| | SEQ ID NO: 172 | FIG. 91 |
| IB20_pCMV-HA-NLS-TnsA | HA-NLS-TnsA | HA-NLS-TnsA: |
| | SEQ ID NO: 173 | FIG. 93 |
| IB20_pCMV-HA-NLS-TnsC | HA-NLS-TnsC | HA-NLS-TnsC: |
| | SEQ ID NO: 174 | FIG. 95 |
| IB20_pCMV-TniQ1-NLS-HA | TniQ1-NLS-HA | TniQ1-NLS-HA |
| | SEQ ID NO: 175 | FIG. 97 |
| IB20_pCMV-TniQ2-NLS-HA | TniQ2-NLS-HA: | TniQ2-NLS-HA |
| | SEQ ID NO: 176 | FIG. 99 |
| IB20_pCMV-TnsA-NLS-HA | TnsA-NLS-HA | TnsA-NLS-HA: |
| | SEQ ID NO: 177 | FIG. 101 |
| IB20_pCMV-TnsC-NLS-HA | TnsC-NLS-HA: | TnsC-NLS-HA: |
| | SEQ ID NO: 178 | FIG. 103 |

[0856] The sequence with the donor plasmid (pDonor_IB20-CmR) is below.

| (SEQ ID NO: 179) | |
|---|---|
| primer_bind | 379..395 |
| | /label = M13 fwd |
| | /note = ″common sequencing primer, one of multiple |
| | similar variants″ |
| misc_feature | 416..470 |
| | /label = gblock |
| misc feature | 471..475 |
| | /label = TSD? |
| misc feature | 476..631 |
| | /label = IB20-RE |
| misc_feature | 484..501 |
| | /label = attTn7 |
| primer_bind | complement(497..521) |
| | /label = Primer 1350 |
| misc_feature | 507..524 |
| | /label = attTn7 |
| misc_feature | 584..601 |
| | /label = attTn7 |
| primer_bind | complement(597..619) |
| | /label = Primer 1351 |
| misc_feature | 614..631 |
| | /label = attTn7 |
| misc_feature | 632..691 |
| | /label = Rside-60bp |
| misc_feature | 1360..1419 |
| | /label = Lside-60bp |
| primer_bind | 1362..1386 |
| | /label = Primer 1353 |
| misc_feature | 1420..1491 |
| | /label = IB20-LE |
| misc_feature | 1420..1437 |
| | /label = attTn7 |
| misc_feature | 1447..1464 |
| | /label = attTn7 |
| primer_bind | 1450..1469 |
| | /label = Primer 1352 |
| misc_feature | complement(1466..1483) |
| | /label = attTn7 |
| misc_feature | 1492..1496 |
| | /label = TSD? |
| misc_feature | 1497..1551 |
| | /label = gblock |

[0857] Plasmids for characterizing PAM (pU6-IB20_CRISPR_PAMcont(−) and pU6-IB20_CRISPR_PAMlib(+)) sequences and features are below.

[0858] pU6-IB20_CRISPR_PAMcont(−)

| (SEQ ID NO: 180) | |
|---|---|
| misc_feature | 1..30 |
| | /label = Overhung |
| primer_bind | 1..30 |
| | /label = Vector.REV |
| primer_bind | 1..22 |
| | /label = Vector.FOR |
| promoter | 14..343 |
| | /label = SV40 promoter |
| | /note = ″SV40 enhancer and early promoter″ |
| rep_origin | 194..329 |
| | /label = SV40 ori |
| | /note = ″SV40 origin of replication″ |
| primer_bind | complement(235..256) |
| | /label = Primer 738 |
| primer_bind | complement(329..348) |
| | /label = Primer 1 |
| polyA_signal | 349..470 |
| | /label = SV40 poly(A) signal |
| | /note = ″SV40 polyadenylation signal″ |
| primer_bind | 349..373 |
| | /label = Primer 2 |
| primer_bind | complement(519..535) |
| | /label = M13 rev |
| | /note = ″common sequencing primer, one of multiple |
| | similar variants″ |
| protein_bind | 543..559 |
| | /label = lac operator |
| | /bound_moiety = ″lac repressor encoded by lacI″ |
| | /note = ″The lac repressor binds to the lac operator to |
| | inhibit transcription in E. coli. This inhibition can be |
| | relieved by adding lactose or |
| | isopropyl-beta-D-thiogalactopyranoside (IPTG).″ |
| promoter | complement(567..597) |
| | /label = lac promoter |
| | /note = ″promoter for the E. coli lac operon″ |
| protein_bind | 612..633 |
| | /label = CAP binding site |
| | /bound_moiety = ″E. coli catabolite activator protein″ |
| | /note = ″CAP binding activates transcription in the |
| | presence of cAMP.″ |
| rep_origin | complement(921..1506) |
| | /direction = LEFT |
| | /label = ori |
| | /note = ″high-copy-number ColE1/pMB1/pBR322/pUC origin of |
| | replication″ |
| CDS | complement(1677..2537) |
| | /codon start = 1 |
| | /gene = ″bla″ |
| | /product = ″beta-lactamase″ |
| primer_bind | 2427..2447 |
| | /label = Primer 261 |
| promoter | complement(2538..2642) |
| | /gene = ″bla″ |
| | /label = AmpR promoter |
| misc_feature | 2643..2667 |
| | /label = Overhung |
| | primer_bind complement(2645..2667) |
| | /label = Vector.FOR |
| promoter | 2668..2908 |
| | /label = U6 promoter |
| | /note = ″RNA polymerase III promoter for human U6 snRNA″ |
| primer_bind | 2668..2688 |
| | /label = hU6-F |
| | /note = ″Human U6 promoter, forward primer″ |
| primer_bind | 2839..2858 |
| | /label = LKO.15' |
| | /note = ″Human U6 promoter, forward primer″ |
| misc_feature | 2879..2908 |
| | /label = Overhung |
| primer_bind | complement(2883..2908) |
| | /label = Vector.REV |
| misc_feature | 2909..2944 |
| | /label = IB20-DR |
| misc_feature | 2980..3015 |
| | /label = IB20-DR |
| misc_feature | 3016..3021 |
| | /label = U6 terminator |
| pU6-IB20_CRISPR_PAMlib(+) | |
| (SEQ ID NO: 181) | |
| misc_feature | 1..30 |
| | /label = Overhung |
| primer_bind | 1..30 |
| | /label = Vector.REV |
| primer_bind | 1..22 |
| | /label = Vector.FOR |
| promoter | 14..343 |
| | /label = SV40 promoter |
| | /note = ″SV40 enhancer and early promoter″ |
| rep_origin | 194..329 |
| | /label = SV40 ori |
| | /note = ″SV40 origin of replication″ |
| primer_bind | complement(235..256) |
| | /label = Primer 738 |
| primer_bind | complement(329..348) |
| | /label = Primer 1 |
| polyA_signal | 349..470 |
| | /label = SV40 poly(A) signal |
| | /note = ″SV40 polyadenylation signal″ |
| primer_bind | 349..373 |
| | /label = Primer 2 |
| primer_bind | complement(519..535) |
| | /label = M13 rev |
| | /note = ″common sequencing primer, one of multiple similar |
| | variants″ |
| protein_bind | 543..559 |
| | /label = lac operator |
| | /bound_moiety = ″lac repressor encoded by lacI″ |
| | /note = ″The lac repressor binds to the lac operator to |
| | inhibit transcription in E. coli. This inhibition can be |
| | relieved by adding lactose or |
| | isopropyl-beta-D-thiogalactopyranoside (IPTG).″ |
| promoter | complement(567..597) |
| | /label = lac promoter |
| | /note = ″promoter for the E. coli lac operon″ |
| protein_bind | 612..633 |
| | /label = CAP binding site |
| | /bound_moiety = ″E. coli catabolite activator protein″ |
| | /note = ″CAP binding activates transcription in the |
| | presence of cAMP.″ |
| rep_origin | complement(921..1506) |
| | /direction = LEFT |
| | /label = ori |
| | /note = ″high-copy-number ColE1/pMB1/pBR322/pUC origin of |
| | replication″ |
| CDS | complement(1677..2537) |
| | /codon start = 1 |
| | /gene = ″bla″ |
| | /product = ″beta-lactamase″ |
| | /label = AmpR |
| | /note = ″confers resistance to ampicillin, carbenicillin, |
| | and related antibiotics″ |
| | /translation = ″ |
| primer_bind | 2427..2447 |
| | /label = Primer 261 |
| promoter | complement(2538..2642) |
| | /gene = ″bla″ |
| | /label = AmpR promoter |
| misc_feature | 2643..2667 |
| | /label = Overhung |
| primer_bind | complement(2645..2667) |
| | /label = Vector.FOR |
| promoter | 2668..2908 |
| | /label = U6 promoter |
| | /note = ″RNA polymerase III promoter for human U6 snRNA″ |
| primer_bind | 2668..2688 |
| | /label = hU6-F |
| | /note = ″Human U6 promoter, forward primer″ |
| primer_bind | 2839..2858 |
| | /label = LKO.1 5' |
| | /note = ″Human U6 promoter, forward primer″ |
| misc feature | 2879..2908 |
| | /label = Overhung |
| primer_bind | complement(2883..2908) |
| | /label = Vector.REV |
| misc_feature | 2909..2944 |
| | /label = IB20-DR |
| misc_feature | 2980..3015 |
| | /label = IB20-DR |
| misc_feature | 3016..3021 |
| | /label = U6 terminator |
| ORIGIN | |

[0859] When the system comprises TnsD2, the donor polynucleotide may be inserted by the Tn7 transposase polypeptides without Cas proteins. In such cases, the target sequence on the locus of the Tn7 transposase, e.g., next to glmS gene. When the system comprises TnsD1, the donor polynucleotide may be inserted by CAST, i.e., Tn7 transposase polypeptides guided by the Cas protein and guide molecule. In such cases, the target sequence can be any sequence determined by the specificity of the Cas protein and the guide molecule. The Cas protein and the guide molecule may be designed to insert the donor to a desired target sequence.

[0860] A 5 bp prominent peak shift between the measurement from LE and RE was generally observed, which suggested target site duplication (TSD).

[0861] The spacers and expression vectors sequence of example IB220 CAST IB is shown below.

TABLE 9

| Plasmid name | Sequence (5′ to 3′) |
|---|---|
| IB20_pCMV-HA-NLS-Cas5 | SEQ ID NO: 182 |
| IB20_pCMV-HA-NLS-Cas6 | SEQ ID NO: 183 |
| IB20_pCMV-HA-NLS-Cas7 | SEQ ID NO: 184 |
| IB20_pCMV-HA-NLS-Cas8 | SEQ ID NO: 185 |
| IB20_pCMV-HA-NLS-TnsD1 | SEQ ID NO: 186 |
| IB20_pCMV-HA-NLS-TnsAB | SEQ ID NO: 187 |
| IB20_pCMV-HA-NLS-TnsC | SEQ ID NO: 188 |
| IB20_pCMV-Cas5-NLS-HA | SEQ ID NO: 189 |
| IB20_pCMV-Cas6-NLS-HA | SEQ ID NO: 190 |
| IB20_pCMV-Cas7-NLS-HA | SEQ ID NO: 191 |
| IB20_pCMV-Cas8-NLS-HA | SEQ ID NO: 192 |
| IB20_pCMV-TnsD1-NLS-HA | SEQ ID NO: 193 |
| IB20_pCMV-TnsAB-NLS-HA | SEQ ID NO: 194 |
| IB20_pCMV-TnsC-NLS-HA | SEQ ID NO: 195 |
| pDonor_IB20-EFS-puro- | SEQ ID NO: 196 |
| pA_SV40ori | |
| pU6-IB20_CRISPR(DR- | SEQ ID NO: 197 |
| spacer-DR_backbone) | |
| pU6-IB20_CRISPR_ID3 | SEQ ID NO: 198 |
| pU6-IB20_CRISPR_ID13 | SEQ ID NO: 199 |
| pU6-IB20_CRISPR_ID16 | SEQ ID NO: 200 |
| pU6-IB20_CRISPR_ID21 | SEQ ID NO: 201 |
| pU6-IB20_CRISPR_ID51 | SEQ ID NO: 202 |
| pU6-IB20_CRISPR_ID52 | SEQ ID NO: 203 |
| pU6-IB20_CRISPR_ID73 | SEQ ID NO: 204 |
| pU6-IB20_CRISPR_ID113 | SEQ ID NO: 205 |
| pU6-IB20_CRISPR_ID114 | SEQ ID NO: 206 |

[0862] Applicants find that while some systems use an RNA-guided homing mechanism, others use a protein-targeted mechanism likely inherited from the transposon. Either one of these mechanisms allows CAST systems to insert themselves into host genomes by targeting well-conserved bacterial genes that serve as safe harbor attachment sites (FIG. 60B). Thus, CAST systems seem to utilize two modes of insertion: transposition to mobile elements using RNA-guided targeting and homing using either RNA-guided targeting or the tniQ tnsD pathway, like Tn7 transposons. Type I-F conserved transcription factors are linked to the switch between pathways (Petassi et al., 2020), and consistent with this observation, Applicants can detect conserved transcription factors within CAST V-K and CAST I-B loci (FIG. 60A) that appear to be distinct from cargo genes and could be linked to transposon pathway switching. Further analysis remains to be done to confirm they are pathway regulators. Applicants also note the inability to detect expression of the homing crRNA in the cyanobacteria host S. hofmannii hinting at potential regulation. In addition to elucidating homing mechanisms, the work here experimentally characterizes the Type I-B CAST systems and demonstrates that both subtypes of I-B CAST systems can transpose via RNA-guided targeting. Importantly, these Type I-B CAST systems provide new starting points for developing genome engineering tools for targeted gene insertion in bacterial genomes (Strecker et al. 2019; Klompe et al. 2019; Rubin et al., 2020; Vo et al., 2020) and potential applications in human cells. Collectively, this work advances the understanding of the biology of these systems, highlighting conserved and divergent features, and shedding light on their mechanisms of action.

[0863] Exemplary CAST IB-1 and CAST IB-2 systems are provided herein. Further exemplary CAST IB-1 proteins are detailed in Table 10A-10B below. CAST I-B1 uses TnsD to home to glmS and TniQ to RNA-guided transposition.

TABLE 10A
CAST IB-1

| Contig Accession | Protein name | Sequence |
|---|---|---|
| NNBU01.1\|NNBU01000031.1\|187002\|Plant | TnsA | SEQ ID NO: 207 |
| | TnsB | SEQ ID NO: 208 |
| | TnsC | SEQ ID NO: 209 |
| | TniQ | SEQ ID NO: 210 |
| | TnsD | SEQ ID NO: 211 |
| | Cas6 | SEQ ID NO: 212 |
| | Cas8 | SEQ ID NO: 213 |
| | Cas7 | SEQ ID NO: 214 |
| | Cas5 | SEQ ID NO: 215 |
| | end1 | SEQ ID NO: 216 |
| | end2 | SEQ ID NO: 217 |
| | CRISPRarray | SEQ ID NO: 218 |
| GCA_001597855.1_ASM159785v1_genomi | TnsA | SEQ ID NO: 219 |
| c\|LUHI01000035.1\|201628\|Anabaena | TnsB | SEQ ID NO: 220 |
| | TnsC | SEQ ID NO: 221 |
| | TniQ | SEQ ID NO: 222 |
| | TnsD | SEQ ID NO: 223 |
| | Cas6 | SEQ ID NO: 224 |
| | Cas8 | SEQ ID NO: 225 |
| | Cas7 | SEQ ID NO: 226 |
| | Cas5 | SEQ ID NO: 227 |
| | end1 | SEQ ID NO: 228 |
| | end2 | SEQ ID NO: 229 |
| | CRISPRarray | SEQ ID NO: 230 |
| GCA_001904715.1_ASM190471v1_genomi | TnsA | SEQ ID NO: 231 |
| c\|MRBZ01000072.1\|42454 \|Nostoc | TnsB | SEQ ID NO: 232 |
| | TnsC | SEQ ID NO: 233 |
| | TniQ | SEQ ID NO: 234 |
| | TnsD | SEQ ID NO: 235 |
| | Cas6 | SEQ ID NO: 236 |
| | Cas8 | SEQ ID NO: 237 |
| | Cas7 | SEQ ID NO: 238 |
| | Cas5 | SEQ ID NO: 239 |
| | end1 | SEQ ID NO: 240 |
| | end2 | |
| | CRISPRarray | SEQ ID NO: 241 |
| NNBT01.1\|NNBT01000035.1\|19217\|Plant | TnsA | SEQ ID NO: 242 |
| | TnsB | SEQ ID NO: 243 |
| | TnsC | SEQ ID NO: 244 |
| | TniQ | SEQ ID NO: 245 |
| | Cas6 | SEQ ID NO: 246 |
| | Cas8 | SEQ ID NO: 247 |
| | Cas7 | SEQ ID NO: 248 |
| | Cas5 | SEQ ID NO: 249 |
| GCA_002245985.1_ASM224598v1_genomi | TnsA | SEQ ID NO: 250 |
| c\|NOLK01000049.1\|56922\|Nostoc | TnsB | SEQ ID NO: 251 |
| | TnsB | SEQ ID NO: 252 |
| | TnsC | SEQ ID NO: 253 |
| | TniQ | SEQ ID NO: 254 |
| | Cas6 | SEQ ID NO: 255 |
| | Cas8 | SEQ ID NO: 256 |
| | Cas7 | SEQ ID NO: 257 |
| | Cas5 | SEQ ID NO: 258 |
| | end1 | SEQ ID NO: 259 |
| | end2 | SEQ ID NO: 260 |
| | CRISPRarray | SEQ ID NO: 261 |
| GCA_010747425.1_ASM1074742v1_genom | TnsA | SEQ ID NO: 262 |
| ic\|JAAGOG010000020.1\|67678\|Nostoc_sp._{—} | TnsB | SEQ ID NO: 263 |
| UIC_10630_NODE_53_length_67678_cov_{—} | TnsC | SEQ ID NO: 264 |
| 46.273/0,_whole_genome_shotgun_sequence | TniQ | SEQ ID NO: 265 |
| | TnsD | SEQ ID NO: 266 |
| | Cas6 | SEQ ID NO: 267 |
| | Cas8 | SEQ ID NO: 268 |
| | Cas7 | SEQ ID NO: 269 |
| | Cas5 | SEQ ID NO: 270 |
| | end1 | SEQ ID NO: 271 |
| | end2 | SEQ ID NO: 272 |
| | CRISPRarray | SEQ ID NO: 273 |
| GCF_002368215.1\|NZ_AP018184\|Nostoc | TnsA | SEQ ID NO: 274 |
| sp. NIES-2111 DNA, nearly complete | TnsB | SEQ ID NO: 275 |
| genome. | TnsC | SEQ ID NO: 276 |
| | TniQ | SEQ ID NO: 277 |
| | TnsD | SEQ ID NO: 278 |
| | Cas6 | SEQ ID NO: 279 |
| | Cas8 | SEQ ID NO: 280 |
| | Cas7 | SEQ ID NO: 281 |
| | Cas5 | SEQ ID NO: 282 |
| | end1 | SEQ ID NO: 283 |
| | end2 | SEQ ID NO: 284 |
| | CRISPRarray | SEQ ID NO: 285 |
| GCA_000317145.1_ASM31714v1_genomic\| | TnsA | SEQ ID NO: 286 |
| CP003600.1\|6284095\|Chamaesiphon_minutu | TnsB | SEQ ID NO: 287 |
| s_PCC_6605, complete_genome | TnsC | SEQ ID NO: 288 |
| | TniQ | SEQ ID NO: 289 |
| | Cas6 | SEQ ID NO: 290 |
| | Cas8 | SEQ ID NO: 291 |
| | Cas7 | SEQ ID NO: 292 |
| | Cas5 | SEQ ID NO: 293 |
| | end1 | SEQ ID NO: 294 |
| | end2 | SEQ ID NO: 295 |
| | CRISPRarray | |

TABLE 10B
CAST IB-1

| Contig Accession | Protein name | sequence |
|---|---|---|
| NC_007413 Trichormus variabilis ATCC | TnsA | SEQ ID NO: 296 |
| 29413, complete sequence; | TnsB | SEQ ID NO: 297 |
| same as NZ_JACKZT010000038 and | TnsC | SEQ ID NO: 298 |
| NC_007413 | TniQ | SEQ ID NO: 299 |
| | TnsD | SEQ ID NO: 300 |
| | Cas6 | SEQ ID NO: 301 |
| | Cas8 | SEQ ID NO: 302 |
| | Cas7 | SEQ ID NO: 303 |
| | Cas5 | SEQ ID NO: 304 |
| | end1 | SEQ ID NO: 305 |
| | end2 | SEQ ID NO: 306 |
| | CRISPRarray | SEQ ID NO: 307 |
| NZ_JACJRG010000001 Anabaena | TnsA | SEQ ID NO: 308 |
| minutissima FACHB-250 contig1, | TnsB | SEQ ID NO: 309 |
| whole genome shotgun sequence | TnsC | SEQ ID NO: 310 |
| | TniQ | SEQ ID NO: 311 |
| | TnsD | SEQ ID NO: 312 |
| | Cas6 | SEQ ID NO: 313 |
| | Cas8 | SEQ ID NO: 314 |
| | Cas7 | SEQ ID NO: 315 |
| | Cas5 | SEQ ID NO: 316 |
| | end1 | SEQ ID NO: 317 |
| | end2 | SEQ ID NO: 318 |
| | CRISPRarray | SEQ ID NO: 319 |
| NZ_JACJQL010000014 Nostoc | TnsA | SEQ ID NO: 320 |
| parmelioides FACHB-3921 contig14, | TnsB | SEQ ID NO: 321 |
| whole genome shotgun sequence | TnsC | SEQ ID NO: 322 |
| | TniQ | SEQ ID NO: 323 |
| | TnsD | SEQ ID NO: 324 |
| | Cas6 | SEQ ID NO: 325 |
| | Cas8 | SEQ ID NO: 326 |
| | Cas7 | SEQ ID NO: 327 |
| | Cas5 | SEQ ID NO: 328 |
| | end1 | SEQ ID NO: 329 |
| | end2 | SEQ ID NO: 330 |
| | CRISPRarray | SEQ ID NO: 331 |
| AP018180 Nostoc carneum | TnsA | SEQ ID NO: 332 |
| NIES-2107 DNA, nearly | TnsB | SEQ ID NO: 333 |
| complete genome | TnsC | SEQ ID NO: 334 |
| | TniQ | SEQ ID NO: 335 |
| | TnsD | SEQ ID NO: 336 |
| | Cas6 | SEQ ID NO: 337 |
| | Cas8 | SEQ ID NO: 338 |
| | Cas7 | SEQ ID NO: 339 |
| | Cas5 | SEQ ID NO: 340 |
| | end1 | SEQ ID NO: 341 |
| | end2 | SEQ ID NO: 342 |
| | CRISPRarray | SEQ ID NO: 343 |
| NZ_JACJPX010000027 Calothrix | TnsA | SEQ ID NO: 344 |
| membranacea FACHB-236 contig27, | TnsB | SEQ ID NO: 345 |
| whole genome shotgun sequence | TnsC | SEQ ID NO: 346 |
| | TniQ | SEQ ID NO: 347 |
| | TnsD | SEQ ID NO: 348 |
| | Cas6 | SEQ ID NO: 349 |
| | Cas8 | SEQ ID NO: 350 |
| | Cas7 | SEQ ID NO: 351 |
| | Cas5 | SEQ ID NO: 352 |
| | end1 | SEQ ID NO: 353 |
| | end2 | SEQ ID NO: 354 |
| | CRISPRarray | SEQ ID NO: 355 |
| NZ_CP026681 Nostoc sp. ‘Peltigera | TnsA | SEQ ID NO: 356 |
| membranacea cyanobiont’ N6 chromosome, | TnsB | SEQ ID NO: 357 |
| complete genome | TnsC | SEQ ID NO: 358 |
| | TniQ | SEQ ID NO: 359 |
| | TnsD | SEQ ID NO: 360 |
| | Cas6 | SEQ ID NO: 361 |
| | Cas8 | SEQ ID NO: 362 |
| | Cas7 | SEQ ID NO: 363 |
| | Cas5 | SEQ ID NO: 364 |
| | end1 | SEQ ID NO: 365 |
| | end2 | SEQ ID NO: 366 |
| | CRISPRarray | SEQ ID NO: 367 |
| JAHHGX010000014 MAG: Calothrix sp. | TnsA | SEQ ID NO: 368 |
| FI2-JRJ7 scaffold_134_c1, whole genome | TnsB | SEQ ID NO: 369 |
| shotgun sequence | TnsC | SEQ ID NO: 370 |
| | TniQ | SEQ ID NO: 371 |
| | TnsD | SEQ ID NO: 372 |
| | Cas6 | SEQ ID NO: 373 |
| | Cas8 | SEQ ID NO: 374 |
| | Cas7 | SEQ ID NO: 375 |
| | Cas5 | SEQ ID NO: 376 |
| | end1 | SEQ ID NO: 377 |
| | end2_incomplete | SEQ ID NO: 378 |
| | CRISPRarray | SEQ ID NO: 379 |
| WBKM01000095 Nostoc sp. WHI contig-7, | TnsA | SEQ ID NO: 380 |
| whole genome shotgun sequence | TnsB | SEQ ID NO: 381 |
| | TnsC | SEQ ID NO: 382 |
| | TniQ | SEQ ID NO: 383 |
| | TnsD | |
| | Cas6 | SEQ ID NO: 384 |
| | Cas8 | SEQ ID NO: 385 |
| | Cas7 | SEQ ID NO: 386 |
| | Cas5 | SEQ ID NO: 387 |
| | end1 | SEQ ID NO: 388 |
| | end2_incomplete | X |
| | CRISPRarray | SEQ ID NO: 389 |
| NZ_JACJQJ010000029 Nostoc linckia | TnsA | SEQ ID NO: 390 |
| FACHB-104 contig29, whole genome | TnsB | SEQ ID NO: 391 |
| shotgun sequence | TnsC | SEQ ID NO: 392 |
| | TniQ | SEQ ID NO: 393 |
| | TnsD | |
| | Cas6 | SEQ ID NO: 394 |
| | Cas8 | SEQ ID NO: 395 |
| | Cas7 | SEQ ID NO: 396 |
| | Cas5 | SEQ ID NO: 397 |
| | end1 | SEQ ID NO: 398 |
| | end2_incomplete | |
| | CRISPRarray | SEQ ID NO: 399 |
| CP070233 MAG: Dolichospermum sp. | TnsA | SEQ ID NO: 400 |
| DET69 chromosome, complete genome | TnsB | SEQ ID NO: 401 |
| | TnsC | SEQ ID NO: 402 |
| | TniQ | SEQ ID NO: 403 |
| | TnsD | |
| | Cas6 | SEQ ID NO: 404 |
| | Cas8 | SEQ ID NO: 405 |
| | Cas7 | SEQ ID NO: 406 |
| | Cas5 | SEQ ID NO: 407 |
| | end1 | SEQ ID NO: 408 |
| | end2_incomplete | SEQ ID NO: 409 |
| | CRISPRarray | SEQ ID NO: 410 |
| NZ_JACJOZ010000086 Phormidium sp. | Cas6 | SEQ ID NO: 411 |
| FACHB-592 contig86, whole genome | Cas8 | SEQ ID NO: 412 |
| shotgun sequence | Cas7 | SEQ ID NO: 413 |
| | Cas5 | SEQ ID NO: 414 |
| | TnsA | SEQ ID NO: 415 |
| | TnsB | SEQ ID NO: 416 |
| | TnsC | SEQ ID NO: 417 |
| | TniQ | SEQ ID NO: 418 |
| | CRISPRarray | SEQ ID NO: 419 |
| | end1 | ? |
| | end2 | ? |
| JAHHIG010000003 MAG: Tildeniella nuda | Cas6 | SEQ ID NO: 420 |
| ZEHNDER 1965/U140 scaffold_38_c1, | Cas8 | SEQ ID NO: 421 |
| whole genome shotgun sequence | Cas7 | SEQ ID NO: 422 |
| | Cas5 | SEQ ID NO: 423 |
| | TnsA | SEQ ID NO: 424 |
| | TnsB | SEQ ID NO: 425 |
| | TnsC | SEQ ID NO: 426 |
| | TniQ | SEQ ID NO: 427 |
| | CRISPRarray | SEQ ID NO: 428 |
| | end1 | ? |
| | end2 | ? |
| JABXKO010000078 MAG: Nostoc sp. JL31 | TnsA | SEQ ID NO: 429 |
| NODE_424_length_75056_cov_172.657, | TnsB | SEQ ID NO: 430 |
| whole genome shotgun sequence | TnsC | SEQ ID NO: 431 |
| | TniQ | SEQ ID NO: 432 |
| | TnsD | SEQ ID NO: 433 |
| | Cas6 | SEQ ID NO: 434 |
| | Cas8 | SEQ ID NO: 435 |
| | Cas7 | SEQ ID NO: 436 |
| | Cas5 | SEQ ID NO: 437 |
| | end1 | SEQ ID NO: 438 |
| | end2 | |
| | CRISPRarray | SEQ ID NO: 439 |
| JABXKF010000034 MAG: Nostoc sp. LPT | TnsD | SEQ ID NO: 440 |
| NODE_346_length_43883_cov_137.902, | Cas6 | SEQ ID NO: 441 |
| whole genome shotgun sequence | Cas8 | SEQ ID NO: 442 |
| | Cas8 | SEQ ID NO: 443 |
| | Cas7 | SEQ ID NO: 444 |
| | Cas5 | SEQ ID NO: 445 |
| | end1 | SEQ ID NO: 446 |
| | end2 | SEQ ID NO: 447 |
| | CRISPRarray | SEQ ID NO: 448 |
| NC_011729 Gloeothece citriformis PCC | TnsA | SEQ ID NO: 449 |
| 7424, complete sequence | TnsB | SEQ ID NO: 450 |
| | TnsC | SEQ ID NO: 451 |
| | TniQ | SEQ ID NO: 452 |
| | TnsD | |
| | Cas6 | SEQ ID NO: 453 |
| | Cas8 | SEQ ID NO: 454 |
| | Cas7 | SEQ ID NO: 455 |
| | Cas5 | SEQ ID NO: 456 |
| | end1 | SEQ ID NO: 457 |
| | end2 | SEQ ID NO: 458 |
| | CRISPRarray | SEQ ID NO: 459 |

[0864] Further exemplary CAST IB-2 systems are detailed in Table 11A-11B below. CAST I-B2 uses TnsD to home to tRNA and TniQ to RNA-guided transposition. It has a TnsAB fusion component.

TABLE 11A
CAST IB-2

| Contig Accession | Protein name | Sequence |
|---|---|---|
| GCA_002368215.1_ASM236821v1_ | TnsAB | SEQ ID NO: 460 |
| genomic\|AP018184.1\|6522801\|Nostoc | TnsC | SEQ ID NO: 461 |
| | TnsD | SEQ ID NO: 462 |
| | TniQ | SEQ ID NO: 463 |
| | Cas6 | SEQ ID NO: 464 |
| | Cas8 | SEQ ID NO: 465 |
| | Cas8 | SEQ ID NO: 466 |
| | Cas7 | SEQ ID NO: 467 |
| | Cas5 | SEQ ID NO: 468 |
| | end1 | SEQ ID NO: 469 |
| | end2 | SEQ ID NO: 470 |
| | CRISPRarray | SEQ ID NO: 471 |
| GCA_001548375.1_ASM154837v1_ | TnsAB | SEQ ID NO: 472 |
| genomic\|AP017295.1\|6463965\|Nostoc | TnsC | SEQ ID NO: 473 |
| | TnsD | SEQ ID NO: 474 |
| | TniQ | SEQ ID NO: 475 |
| | Cas6 | SEQ ID NO: 476 |
| | Cas8 | SEQ ID NO: 477 |
| | Cas7 | SEQ ID NO: 478 |
| | Cas5 | SEQ ID NO: 479 |
| | end1 | SEQ ID NO: 480 |
| | end2 | SEQ ID NO: 481 |
| | CRISPRarray | SEQ ID NO: 482 |
| GCA_002368155.1_ASM236815v1_ | TnsAB | SEQ ID NO: 483 |
| genomic\|AP018180.1\|8352649\|Nostoc | TnsC | SEQ ID NO: 484 |
| | TnsD | SEQ ID NO: 485 |
| | TniQ | SEQ ID NO: 486 |
| | Cas6 | SEQ ID NO: 487 |
| | Cas8 | SEQ ID NO: 488 |
| | Cas7 | SEQ ID NO: 489 |
| | Cas5 | SEQ ID NO: 490 |
| | end1 | SEQ ID NO: 491 |
| | end2 | SEQ ID NO: 492 |
| | CRISPRarray | SEQ ID NO: 493 |
| GCA_003326195.1_ASM332619v1_ | TnsAB | SEQ ID NO: 494 |
| genomic\|LXQE01000125.1\|29031 5\| | TnsC | SEQ ID NO: 495 |
| Nostoc | TnsD | SEQ ID NO: 496 |
| | TniQ | SEQ ID NO: 497 |
| | Cas6 | SEQ ID NO: 498 |
| | Cas8 | SEQ ID NO: 499 |
| | Cas7 | SEQ ID NO: 500 |
| | Cas5 | SEQ ID NO: 501 |
| | end1 | SEQ ID NO: 502 |
| | end2 | SEQ ID NO: 503 |
| | CRISPRarray | SEQ ID NO: 504 |
| GCA_002246015.1_ASM224601v1_ | TnsAB | SEQ ID NO: 505 |
| genomic\|NOLJ01000002.1\|100213 8\| | TnsC | SEQ ID NO: 506 |
| Nostoc | TnsD | SEQ ID NO: 507 |
| | TniQ | SEQ ID NO: 508 |
| | Cas6 | SEQ ID NO: 509 |
| | Cas8 | SEQ ID NO: 510 |
| | Cas7 | SEQ ID NO: 511 |
| | Cas5 | SEQ ID NO: 512 |
| | end1 | SEQ ID NO: 513 |
| | end2 | SEQ ID NO: 514 |
| | CRISPRarray | SEQ ID NO: 515 |
| GCA_002361335.1_ASM236133v1_ | TnsAB | SEQ ID NO: 516 |
| genomic\|DESS01000065.1\|32925 \| | TnsAB | SEQ ID NO: 517 |
| TPA_asm: | TnsC | SEQ ID NO: 518 |
| | TnsD | SEQ ID NO: 519 |
| | TniQ | SEQ ID NO: 520 |
| | Cas6 | SEQ ID NO: 521 |
| | Cas8 | SEQ ID NO: 522 |
| | Cas7 | SEQ ID NO: 523 |
| | Cas5 | SEQ ID NO: 524 |
| | end1 | SEQ ID NO: 525 |
| | end2 | SEQ ID NO: 526 |
| | CRISPRarray | SEQ ID NO: 527 |
| GCA_000147335.1_ASM14733v1_ | TnsAB | SEQ ID NO: 528 |
| genomic\|CP002200.1\|473846\| | TnsC | SEQ ID NO: 529 |
| Cyanothece | TniQ | SEQ ID NO: 530 |
| | TnsD | SEQ ID NO: 531 |
| | Cas6 | SEQ ID NO: 532 |
| | Cas8 | SEQ ID NO: 533 |
| | Cas7 | SEQ ID NO: 534 |
| | Cas5 | SEQ ID NO: 535 |
| | end1 | SEQ ID NO: 536 |
| | end2 | SEQ ID NO: 537 |
| | CRISPRarray | SEQ ID NO: 538 |
| GCA_002355455.1_ASM235545v1_ | TnsAB | c |
| genomic\|AP017375.1\|5319768\| | TnsC | SEQ ID NO: 539 |
| Stanieria | TnsD | SEQ ID NO: 540 |
| | TniQ | SEQ ID NO: 541 |
| | Cas6 | SEQ ID NO: 542 |
| | Cas8 | SEQ ID NO: 543 |
| | Cas7 | SEQ ID NO: 544 |
| | Cas5 | SEQ ID NO: 545 |
| | end1 | SEQ ID NO: 546 |
| | end2 | SEQ ID NO: 547 |
| | CRISPRarray | SEQ ID NO: 548 |
| GCA_000021805.1_ASM2180v1_ | TnsAB | SEQ ID NO: 549 |
| genomic\|CP001287.1\|4679413\| | TnsC | SEQ ID NO: 550 |
| Cyanothece | TniQ | SEQ ID NO: 551 |
| | TnsD | SEQ ID NO: 552 |
| | Cas6 | SEQ ID NO: 553 |
| | Cas8 | SEQ ID NO: 554 |
| | Cas7 | SEQ ID NO: 555 |
| | Cas5 | SEQ ID NO: 556 |
| | end1 | SEQ ID NO: 557 |
| | end2 | SEQ ID NO: 558 |
| | CRISPRarray | SEQ ID NO: 559 |
| GCA_002896875.1_ASM289687v1_ | TnsAB | SEQ ID NO: 560 |
| genomic\|CP023278.1\|6990729\| | TnsC | SEQ ID NO: 561 |
| Nostoc | TniQ | SEQ ID NO: 562 |
| | TnsD | SEQ ID NO: 563 |
| | Cas6 | SEQ ID NO: 564 |
| | Cas8 | SEQ ID NO: 565 |
| | Cas7 | SEQ ID NO: 566 |
| | Cas5 | SEQ ID NO: 567 |
| | end1 | SEQ ID NO: 568 |
| | end2 | SEQ ID NO: 569 |
| | CRISPRarray | SEQ ID NO: 570 |
| GCA_900010725.1_BBR_ | TnsAB | SEQ ID NO: 571 |
| PRJEB10992_genomic\|LN886408.1\| | TnsC | SEQ ID NO: 572 |
| 225910\|Planktothrix | TniQ | SEQ ID NO: 573 |
| | TnsD | SEQ ID NO: 574 |
| | Cas6 | SEQ ID NO: 575 |
| | Cas8 | SEQ ID NO: 576 |
| | Cas7 | SEQ ID NO: 577 |
| | Cas7 | SEQ ID NO: 578 |
| | Cas5 | SEQ ID NO: 579 |
| | end2 | s |
| | CRISPRarray | SEQ ID NO: 580 |
| GCA_002367975.1_ASM236797v1_ | TnsA | SEQ ID NO: 581 |
| genomic\|AP018174.1\|6565356\| | TnsB | SEQ ID NO: 582 |
| Anabaenopsis_circularis_NIES- | TnsAB | SEQ ID NO: 583 |
| 21_DNA,_nearly_complete_genome | TnsC | SEQ ID NO: 584 |
| | TniQ | SEQ ID NO: 585 |
| | Cas6 | SEQ ID NO: 586 |
| | Cas3 | SEQ ID NO: 587 |
| | Cas8 | SEQ ID NO: 588 |
| | Cas7 | SEQ ID NO: 589 |
| | Cas5 | SEQ ID NO: 590 |
| | CRISPRarray | SEQ ID NO: 591 |
| GCA_011769525.1_ASM1176952v1_ | TnsAB | SEQ ID NO: 592 |
| genomic\|CP050440.1\|8479123\| | TnsC | SEQ ID NO: 593 |
| Tolypothrix_sp._PCC_7910__ | TiQ | SEQ ID NO: 594 |
| chromosome,_complete_genome | TnsD | SEQ ID NO: 595 |
| | Cas6 | SEQ ID NO: 596 |
| | Cas8 | SEQ ID NO: 597 |
| | Cas7 | SEQ ID NO: 598 |
| | Cas5 | SEQ ID NO: 599 |
| | end1 | SEQ ID NO: 600 |
| | end2 | SEQ ID NO: 601 |
| | CRISPRarray | SEQ ID NO: 602 |

TABLE 11B
Exemplary CAST I-B2

| Contig Accession | Protein name | sequence |
|---|---|---|
| NZ_BLJI01000007 Chroococcus | TnsAB | SEQ ID NO: 603 |
| sp. FPU101 sequence007, whole | TnsC | SEQ ID NO: 604 |
| genome shotgun sequence | TniQ | SEQ ID NO: 605 |
| | TnsD | SEQ ID NO: 606 |
| | Cas6 | SEQ ID NO: 607 |
| | Cas8 | SEQ ID NO: 608 |
| | Cas7 | SEQ ID NO: 609 |
| | Cas5 | SEQ ID NO: 610 |
| | end1 | SEQ ID NO: 611 |
| | end2 | SEQ ID NO: 612 |
| | CRISPRarray | SEQ ID NO: 613 |
| JABXKL010000085 MAG: | TnsAB | SEQ ID NO: 614 |
| Nostoc sp. NMS9 NODE_61_ | TnsC | SEQ ID NO: 615 |
| length_125134_cov_158.972, | TniQ | SEQ ID NO: 616 |
| whole genome shotgun sequence | TnsD | SEQ ID NO: 617 |
| | Cas6 | SEQ ID NO: 618 |
| | Cas8 | SEQ ID NO: 619 |
| | Cas7 | SEQ ID NO: 620 |
| | Cas5 | SEQ ID NO: 621 |
| | end1 | SEQ ID NO: 622 |
| | end2 | SEQ ID NO: 623 |
| | CRISPRarray | SEQ ID NO: 624 |
| JACJSL010000013 | TnsAB | SEQ ID NO: 625 |
| Coleofasciculus sp. FACHB- | TnsC | SEQ ID NO: 626 |
| SPT36 contig13, whole | TniQ | SEQ ID NO: 627 |
| genome shotgun sequence | TnsD | SEQ ID NO: 628 |
| | Cas6 | SEQ ID NO: 629 |
| | Cas8 | SEQ ID NO: 630 |
| | Cas7 | SEQ ID NO: 631 |
| | Cas5 | SEQ ID NO: 632 |
| | end1 | SEQ ID NO: 633 |
| | end2 | SEQ ID NO: 634 |
| | CRISPRarray | SEQ ID NO: 635 |
| JACJSL010000013 | TnsAB | SEQ ID NO: 636 |
| Coleofasciculus sp. FACHB- | TnsC | SEQ ID NO: 637 |
| SPT36 contig13, whole | TniQ | SEQ ID NO: 638 |
| genome shotgun sequence | TnsD | SEQ ID NO: 639 |
| | Cas6 | SEQ ID NO: 640 |
| | Cas8 | SEQ ID NO: 641 |
| | Cas7 | SEQ ID NO: 642 |
| | Cas5 | SEQ ID NO: 643 |
| | end1 | SEQ ID NO: 644 |
| | end2 | SEQ ID NO: 645 |
| | CRISPRarray | SEQ ID NO: 646 |
| JAHHHN010000012 MAG: | TnsAB | SEQ ID NO: 647 |
| Mojavia pulchra JT2-VF2 | TnsC | SEQ ID NO: 648 |
| scaffold_119_c1, whole | TniQ | SEQ ID NO: 649 |
| genome shotgun sequence | TnsD | SEQ ID NO: 650 |
| | Cas6 | SEQ ID NO: 651 |
| | Cas8 | SEQ ID NO: 652 |
| | Cas7 | SEQ ID NO: 653 |
| | Cas5 | SEQ ID NO: 654 |
| | end1 | SEQ ID NO: 655 |
| | end2 | SEQ ID NO: 656 |
| | CRISPRarray | SEQ ID NO: 657 |
| NZ_CP040272 Nostoc sp. | TnsAB | SEQ ID NO: 658 |
| C052 chromosome, | TnsC | SEQ ID NO: 659 |
| complete genome | TniQ | SEQ ID NO: 660 |
| | TnsD | SEQ ID NO: 661 |
| | Cas6 | SEQ ID NO: 662 |
| | Cas8 | SEQ ID NO: 663 |
| | Cas7 | SEQ ID NO: 664 |
| | Cas5 | SEQ ID NO: 665 |
| | end1 | SEQ ID NO: 666 |
| | end2 | SEQ ID NO: 667 |
| | CRISPRarray | SEQ ID NO: 668 |
| JAHHHR010000046 MAG: | TnsAB | SEQ ID NO: 669 |
| Nostoc desertorum CM1- | TnsC | SEQ ID NO: 670 |
| VF14 scaffold_107_c2, | TniQ | SEQ ID NO: 671 |
| whole genome shotgun | TnsD | SEQ ID NO: 672 |
| sequence | Cas6 | SEQ ID NO: 673 |
| | Cas8 | SEQ ID NO: 674 |
| | Cas7 | SEQ ID NO: 675 |
| | Cas5 | SEQ ID NO: 676 |
| | end1 | SEQ ID NO: 677 |
| | end2 | SEQ ID NO: 678 |
| | CRISPRarray | SEQ ID NO: 679 |
| NZ_JACJSL010000013 | TnsAB | SEQ ID NO: 680 |
| Coleofasciculus sp. FACHB- | TnsC | SEQ ID NO: 681 |
| SPT36 contig13, whole | TniQ | SEQ ID NO: 682 |
| genome shotgun sequence | TnsD | SEQ ID NO: 683 |
| | Cas6 | SEQ ID NO: 684 |
| | Cas8 | SEQ ID NO: 685 |
| | Cas7 | SEQ ID NO: 686 |
| | Cas5 | SEQ ID NO: 687 |
| | end1 | SEQ ID NO: 688 |
| | end2 | SEQ ID NO: 689 |
| | CRISPRarray | SEQ ID NO: 690 |
| JACJOB010000093 | TnsAB | SEQ ID NO: 691 |
| Cyanobacteria bacterium | TnsC | SEQ ID NO: 692 |
| FACHB-472 contig93, whole | TniQ | SEQ ID NO: 693 |
| genome shotgun sequence | TnsD | SEQ ID NO: 694 |
| | Cas6 | SEQ ID NO: 695 |
| | Cas8 | SEQ ID NO: 696 |
| | Cas7 | SEQ ID NO: 697 |
| | Cas5 | SEQ ID NO: 698 |
| | end1 | SEQ ID NO: 699 |
| | end2 | SEQ ID NO: 700 |
| | CRISPRarray | SEQ ID NO: 701 |
| NZ_JACJPD010000045 | TnsAB | SEQ ID NO: 702 |
| Microcoleus sp. FACHB-53 | TnsC | SEQ ID NO: 703 |
| contig45, whole genome | TniQ | SEQ ID NO: 704 |
| shotgun sequence | TnsD | SEQ ID NO: 705 |
| | Cas6 | SEQ ID NO: 706 |
| | Cas8 | SEQ ID NO: 707 |
| | Cas7 | SEQ ID NO: 708 |
| | Cas5 | SEQ ID NO: 709 |
| | end1 | SEQ ID NO: 710 |
| | end2 | SEQ ID NO: 711 |
| | CRISPRarray | SEQ ID NO: 712 |

### EXAMPLES

### Example 1. Genome Targeting by CAST I-B

[0865] Applicants undertook human genome targeting by CAST I-B using 96 guides (Guide ID1-96) targeting loci from publications, including, from Cas9, EMX1, Cong et al., 2013; from Cas12b, DNMT1, CXCR4 (Strecker et al., 2019); from Cas3, CCR5, SLC35A2, VEGFA, B2M (Morisaka et al., 2019); and safe harbor locus for transgene, AAVS1. An additional 24 guides (ID97-120) targeting LINE1 ORF2 (20,000-50,000 copies) (Smith et al., 2020). FIG. 1 shows exemplary human genome targeting by CAST I-B for SCL35A2 with insertion site, and readout: junction PCR. One primer designed on donor and one primer on target for both sides, with primer for downstream and upstream depicted. An example

[0866] Example insertions of LINE1 ORF2 targeting using ID114 guide by PmcCAST is shown in FIG. 2A-2C. FIG. 2A depicts example insertion and measurement of distance from PAM by RE and LE junction, as depicted in FIG. 2B; FIG. 2C shows right end junction sequence with prospective target-site duplication (TSD) and left end junction sequence, each with donor sequence and target sequence shown. Measurement of target-site duplication shows about 5 bp difference (see, e.g., Hickman and Dyda, Chem. Rev. 2016, 116, 20, 12758-12784). Results of single locus targeting by PmcCAST using ID23 guide (EMX1), ID21 (DNM1) and ID52 (SLC35A2) is depicted in FIG. 3A, with LE junction sequence and RE junction sequence for ID3 guide directed to EMX1 target shown in FIG. 3B with prospective TSD indicated. Both LE and RE junctions were recovered from only 6 out of 96 sites.

[0867] CAST IB subtype1 system also works on human genome. Examples of insertion positions at 70-90 bp downstream of PAM are depicted in FIG. 4A. An example of junction sequence confirmation for IB29, DNMT1 At 80 bp downstream from PAM on the RE side is shown in FIG. 4B.

### Mitochondrial Targeting

[0868] Applicants investigated potential for mitochondrial targeting with CAST I-B systems. IB20 spacer positions on hs mtDNA are shown in FIG. 5. Each mitochondrion can contain 2-10 copies of mtDNA and up to 10³ mitochondria present per cell. Cf. Mok et al., Nature 2020 (TALEN target sites). The trial utilized MTS-tagged CAST vectors with a control: NLS-. A first set of N-NLS-IB20 and C-NLS-IB20 vectors and a send set of MTS1-IB20 and MTS2-IB20 tagged vectors were utilized, with co-transfection into 293 FT cells. (FIG. 6A, 6B) After 2 days, the cells were then subjected to quick extraction and next generation sequencing. (FIG. 6B).

[0869] Three guides for junction with purified mitochondria (FIG. 7). Fractionation by 2 step centrifugation to achieve a prospective ‘mitochondria fraction in fractions 4-7’ is show in in FIG. 8. Insertion is recovered from mitochondria, recovered from fractionation. Gel shows amplicons for NGS (20+15 cycles PCR), with visible amplicon at mammalian experiment with 10⁷-10⁸ mtDNA copies (c.a. 100 pg-1 ng) in 12.5 ul PCR reaction (9A) with insertion reads for each fraction shown in FIG. 9B.

[0870] Applicant quantified insertion reads, with unique insertion reads count shown in FIG. 10. The frequency is provided as a percent with quantification of unique insertion reads with a pDonor construct containing a 6N-Unique Molecular Identifier (UMI).

[0871] Tagging position preference was investigated based on LINE1 targeting by Pmc CAST1 measured in total insertion reads (FIG. 11). N-terminal tagging with HA-NLS (SV40)-linker and C-terminal tagged linker-NLS (SV40)-HA for Cas5, Cas6, Cas7, Cas8, TnsAB, TnsC and TniQ undertaken. Result show that generally the C-terminus of TnsAB should not be tagged. While the tagging of the C-terminal of Cas8 was not as critical compared to TnsAB, Cas8 C-terminal tagging not as desirable. Indeed, combination of C-tagged TnsAB and C-tagged Cas8 was detrimental. Generally, N-terminal taggins I more preferred to C-terminal tagging.

[0872] Small compounds were investigated for potential increase in efficiency of insertions with CAST1-B systems, including (12A) DNA damage repair enzymes and epigenetic modifiers and reader and (12B) epigenetic modifiers, Poly (ADP-ribose) polymerases (PARPs) and topoisomerases. A s small scale compound screen on LINE1 by Pmc CAST I-B with 12 biological replicates no treatment control as shown in FIG. 13. 1000 unique reads=0.001% of total LINE1 in 96 well cells. Insertion was significantly less for samples with physiologically “toxic” inhibitors (e.g., topoisomerase II inhibitors: C90, C92, C94 and C96) as cell number itself is decreased. It also appeared some epigenetic modifier inhibitors (HDAC, Histone demethylases etc.) may increase efficiency on LINE1.

### Example 2. IB-43

[0873] IB43, also described and identified as 330460_0|0|GCA_011769525.1_ASM1176952v1_genomic|CP050440.1|8479123 Tolypothrix_sp._PCC_7910_chromosome, and set forth in table 13, provides the following locus sequence from LE to RE: (SEQ ID NO: 713)

[0874] As shown in FIG. 14A-14B, CAST IB43 can target single loci on the human genome, where ˜72/92 guides tested showed insertions about 90 base pairs after PAM using NGS insertion reads on the LE side. Example insertion for VEGFA (guide ID78) is depicted in FIG. 15.

[0875] CAST IB42 can also target single loci on the human genome, with about 41/89 guide tested showing insertions about 90 bp after PAM (FIG. 16A-16B), with an example sequencing result of insertion 88 bp after PAM for B2M loci with guide ID87 (FIG. 17).

### Mammalian Cell Assay

[0876] FIG. 18 outlines the experimental approach of an R6K origin plasmid assay conducted in HEK293FT mammalian cells Briefly, after co-transfection in HEK293FT cells of pDonor, pTarget, pHelpers and pGuide, plasmids were extracted, E. coli transformed and colonies selected for Kanamycin and Cm resistance, with surviving colonies subjected to Tn5 whole plasmid sequencing and Nanopore sequencing. 96 E. coli colonies checked (FIG. 18B) with TSD observed in each single pInsert species from E. coli colony (18C). FIGS. 19 and 20 show imaging results indicate cellular aggregates for several components, unclear if not as efficient protein folding in human cells.

[0877] EXM1 ID12 guide insertion reads and UMI counts shown in FIG. 21A-21B; similar analyses conducted for CXCR4 guide (ID34) (FIG. 22A-22B), VEGFA ID78 guide (FIG. 23A-23B); B2M ID78 guide (FIG. 24A-24B).

[0878] Evaluation of IB43 targeting in HeLa, 293 FT and U2OS cells and IB42 targeting in 293 FT cells are shown in FIG. 25A-25D with UMI counts.

[0879] IB43 shows reproducible insertion on human genome, with unique insertion reads from 80-100 bp after PAM by LE side junction confirmation (FIG. 26A-26C). IB43 tag position with two different guides, Guide ID78 and GuideID 87 was evaluated in FIGS. 27A and 227B. The violin plot for 128 samples classified by N-C-tag with 64 points for each condition indicate the QCascade component has flexibility on both N-/C-side. The results further indicate avoiding tagging of the C-terminus of TnsAB and of TnsC.

### Optimization of CAST Components

[0880] Applicants further undertook dilution of CAST components expression plasmid to optimize QCascade and TnsAB/C expression plasmid amount. Each N-/C-RG at 5 ng (for 96 well 100 ng transfection) was starting point for Sample 1 and serially diluted, with adjustment by GFP. 10 ng donor+Guide ID87 20 ng for all samples (FIG. 29A) Results are shown in FIG. 29B.

[0881] IB43 plasmid amount was further evaluated with 5 ng N-NLS-ORF+5 ng C-NLS-ORF (10 ng ORF) or 0.5 ng N-NLS-ORF+0.5 ng C-NLS-ORF (1 ng ORF)+9 ng GFP were evaluated with unique insertion reads displayed in FIG. 30. FIG. 31 includes violin plots of 128 combinations classified by 10 ng or 1 ng each component (64 samples for each condition) indicated 1 ng TnsAB is better than 10 ng and 1 ng TnsC is better than 10 ng.

[0882] Using optimized conditions, 96 sites were targeted again. In particular, C-tag TnasAB and C-tag TnsC was removed from the plasmid pool, with a reduced plasmid amount for N-tag TnsAB and C-tag TnsC. Optimized conditions (‘new’) compared to previous conditions (‘old’).

[0883] Applicants also evaluated optimization of pDonor and pGuide amount, with pDonor 10 ng and pGuide 20 ng (for 96 well 100 ng transfection) as starting point (Sample1) that is serially diluted (FIG. 33A). 5% of QE extract (96 well, c.a. 5000 cells) was subjected to PCR amplification. Unique insertion reads are shown in FIG. 33; pGuide could be diluted while it depends on pDonor amount. Increased portions of pDonor and pGuide were similarly evaluated (FIG. 34A,34B), where more protein component appeared better. Thus, using 10 ng each of QCascade and pDonor and 1 ng each of TnsAB/C and pGuide with a potentially less toxic promoter appears more optimal.

[0884] Transfection with all mRNA CAST components was evaluated for CAST IB43, leading to insertions on the genome about 8- to 90 bp after the PAM. Donor and Guide were delivered with plasmids, and all mRNA CAST components were compared to pQCascade+mRNA TnsABC, pQCascade only, or mRNA QCascade only. (FIG. 35). Results of mRNA transfection of TnsABC leads to expected insertion products as indicated in Geneious mapping, junction PCR LE side for example Lipofectamine 3000 transfection. The same can be seen for other transfection methods as well (not pictured).

[0885] Plasmid boost at mRNA CAST components delivery was evaluated, using plasmid transfection for 1-7 protein components and pDonor/pGuide (ID87), 7 mRNA co-transfection for Cas5, 6, 7, 8, TnsAB, C and TniQ (pseudoUTP+polyA), with addition of CAST component/GFP as indicated in chart below unique insertion reads of FIG. 37. A violin plot for 128 samples classified by +/−plasmid boost indicates more Cas8 is limiting factor, with no more TnsC.

[0886] A comparison of transfection methods for example CAST IB43 system and VEGFA locus (ID78 guide) using plasmid for all components or plasmidQCascade+mRNA TnsAB/C is shown in FIG. 39A. Transfection using lipofectamine (LF) 3000, LF2000, FuGENE, or polyethylenimine (PEI), with or without mRNA transfection is shown in FIG. 39A, 39B. Even after passaging one can see expected insertions in the genome ˜90 bp after the PAM (FIG. 40). The NGS PCR Gels shown in FIGS. 41A and 41B are 1^{st} passage, and after puro selection and 2^{nd} passage, respectively for different the transfections. The all DNA transfection by PEI still reveals RE side insertion reads 2 days post transfection (QE) (FIG. 42A) and after 3 passages, puro selection (genome extraction) (FIG. 42B).

[0887] ddPCR was used to evaluate the three best transfection conditions with diluted donors, 1) plasmid for all components; 2) plasmid for QCascade and mRNA for TnsAB/C; and 3) mRNA for all components (FIG. 43). Linear donors with either no modification or 5′ ends 5 nt PTO were evaluated in FIG. 44.

### Polycistronic Vector

[0888] Further evaluation of a polycistronic vector (all proteins+guide) construction was evaluated a systematic and modular way so that we can utilize this expression vector for other projects to express 5-7 proteins as all-in-one vector. First, DNA sequences for all six P2A are slightly different each other (same amino acid, rare codon is removed). Second, DNA sequences for all NLS and GS-linker are also slightly different each other (same amino acid, rare codon is removed). Third, Casette1-5 are interchangeable each other; fragment preparation for Golden Gate Assembly by PCR doesn't depend on each ORF sequence. See FIG. 45. A functionality test for the QCascade component with a new tag, SV40NLS-GSG-ORF-GSGSGGSG (SEQ ID NO: 72)+N-TnsAB and N-TnsC was evaluated (FIG. 46A-Q Cascade in Cassette105.-25 constructs=5 positions×5 proteins). The new constructs for Cas5, 6, 7, 8 and TniQ work with the N-TnsAB and N-TnsC as shown in FIG. 46B.

[0889] Th expression of each component from the polycistronic vector is shown in FIG. 47, with Day): transfection, ay2: Puro selection start, Day 14: WB.

[0890] CAST IB43 polycistronic 14 helpers trial was also conducted (Q*XXX-AB-IRES-C+guide ID87). (FIG. 48) Results of plasmid donor and linear donor for 8QXXX (6 construct), Q8XXX (6 constructs), Q-6875 (bacterial operon) and 6875-Q (bacterial operon) at 48 hours after transfection are shown in FIG. 48B. 7-monocistronic fared better than polycistronic in the trial, with plasmid donors performing better than linear donor.

[0891] Monocistronic pHelpers transfection was also performed for ID42, ID78 and ID87 with plasmid donors and linear donors. dR junction unique insertion reads seem to be within the same order of magnitude as μL unique insertion reads, with pDonor performing better than linear donor (FIG. 49). Similarly, with polycistronic transfection of ID87, dR junction unique insertion reads seem to be within the same order of magnitude as μL unique insertion reads, with pDonor performing mostly better than linear donor (FIG. 50).

### IB43-TnsAB and TnsC Mutants Effect on Mammalian Genome Targeting

[0892] Mutations at E62, D104, and K119 of the catalytic core of TnsA part of the polypeptide; mutations at D519, D588, E624 of the catalytic core of TnsB part; and H164 of IB43 TnsC which corresponds to A225 of Canonical Tn7 TnsC (A225V is hyperactive mutant) were evaluated using a plasmid donor and a linear donor (FIG. 51). TnsA part mutants decreased insertion reads, TnsB part mutants yielded near to no insertions and TnsC H164X mutations did not increase activity. Overall, the linear donor was less efficient than the plasmid donor.

IB Subtype 2 Compatibility with IB43

[0893] Applicants evaluated I-B subtype 2 compatibility with CAST IB43, also a subtype 2 system. IB20, IB42, and IB43 have been shown as active subtype2 orthologs on the human genome. Applicants evaluated Cas5, Cas6, Cas7, Cas8 and TniQ from other I-B subtype 2 systems while using other components form IB43. Results, shown in FIG. 52A indicate the QCascade is highly compatible with each other. TnsAB/C disappear less compatible which, without being bound by theory, may be due to donor sequence recognition requirement for TnsAB (as IB43 donor is used in this experiment), and/or TnsAB-TnsC interaction specificity. Assuming that TniQ is supportive factor to stabilize R-loop, TniQ-TnsC interaction should not be mandatory. Thus, it may be that an ortholog-specific TnsC sequence is needed to recruit specific TnsAB. FIG. 52B shows better-performing orthologs for each component that could be sued to make a chimeric system, Cas5 IB45, Cas6 and Cas7 from IB48, Cas8 from IB46, TnsAB from IB43, TnsC from IB25 and TniQu from IB36. Using this combination, unique insertion reads are shown in FIG. 53, with results indicated the combination of the better components from different orthologs did not generate significantly improved unique insertion reads.

[0894] Human safe harbor loci targeting with 48 guides was evaluated using CAST IB43 with 48 guides on CCR5, humanRosa26, H11 and 2 additional loci (FIG. 54). Additional evaluation with sfGFP fusion constructs for IB43 was evaluated, indicated that TnsC/TniQ both N-terminal sfGFP tagging and TnsA N-terminal sfGFP tagging were not allowed (FIG. 55).

### Cas12 and IB43

[0895] Human genome targeting by BhdCas12b-IB43Q IB43AB and IB43C with LINE1 targeting (FIG. 56A) Insertion for LINE1 at 81 bp downstream from PAM with PAM-LE-cargo-RE direction was same as IB43 and 2 reads out of total 120339 reads. Human genome targeting by BhdCas12b-IB43Q IB43AB and IB43C with H11 safe harbor locus targeting (56B) showed insertion at 61 bp downstream from PAM with PAM-RE-cargo-LE direction, opposite to native IB43 and 2 reads out of a total 58914 reads. This is compared to that native BI43 engineered system (QCascade+ TnsAB and TnsC) with 1000-30000 UMI reads/50000 total reads. As the system is less efficient than native IB43, the reads on the RE side is not still detectable and target site duplication speculation is difficult. Further investigation of the system can be performed after optimization.

[0896] dCas12a, dCas12b, dCasPhi and native IB43 were compared with the dCas12 used with TniQ+ TnsAB,C from IB43. As illustrated in FIG. 57A,57B, no TniQ-Cas12 fusions are comparable with native IB43 efficiency.

### Plasmid Targeting In Vitro

[0897] As shown in FIG. 58, IB43 from transfected HEK293FTs can facilitate plasmid targeting in vitro, with unique insertion reads showing for in vitro reaction with target plasmid spike-in. The expected LE junction PCR band is visible for in vitro CAST-transfected cell lysate reaction with 100 ng pTarget spike-in (FIG. 59).

TABLE 12
Expression Plasmids

| Plasmid | Sequence | Description |
|---|---|---|
| IB43_pCMV-HA-NLS-Cas5 | SEQ ID NO: 714 | Monocistronic expression for HA-NLS-IB43_Cas5 |
| IB43_pCMV-HA-NLS-Cas6 | SEQ ID NO: 715 | Monocistronic expression for HA-NLS-IB43_Cas6 |
| IB43_pCMV-HA-NLS-Cas7 | SEQ ID NO: 716 | Monocistronic expression for HA-NLS-IB43_Cas7 |
| IB43_pCMV-HA-NLS-Cas8 | SEQ ID NO: 717 | Monocistronic expression for HA-NLS-IB43_Cas8 |
| IB43_pCMV-HA-NLS-TniQ | SEQ ID NO: 718 | Monocistronic expression for HA-NLS-IB43_TniQ |
| IB43_pCMV-HA-NLS-TnsAB | SEQ ID NO: 719 | Monocistronic expression for HA-NLS-IB43_TnsAB |
| IB43_pCMV-HA-NLS-TnsC | SEQ ID NO: 720 | Monocistronic expression for HA-NLS-IB43_TnsC |
| IB43_pCMV-HA-NLS-TnsD | SEQ ID NO: 721 | Monocistronic expression for HA-NLS-IB43_TnsD |
| IB43_pCMV-Cas5-NLS-HA | SEQ ID NO: 722 | Monocistronic expression for IB43_Cas5-NLS-HA |
| IB43_pCMV-Cas6-NLS-HA | SEQ ID NO: 723 | Monocistronic expression for IB43_Cas6-NLS-HA |
| IB43_pCMV-Cas7-NLS-HA | SEQ ID NO: 724 | Monocistronic expression for IB43_Cas7-NLS-HA |
| IB43_pCMV-Cas8-NLS-HA | SEQ ID NO: 725 | Monocistronic expression for IB43_Cas8-NLS-HA |
| IB43_pCMV-TniQ-NLS-HA | SEQ ID NO: 726 | Monocistronic expression for IB43_TniQ-NLS-HA |
| IB43_pCMV-TnsAB-NLS-HA | SEQ ID NO: 727 | Monocistronic expression for IB43_TnsAB-NLS-HA |
| IB43_pCMV-TnsC-NLS-HA | SEQ ID NO: 728 | Monocistronic expression for IB43_TnsC-NLS-HA |
| IB43_pCMV-TnsD-NLS-HA | SEQ ID NO: 729 | Monocistronic expression for IB43_TnsD-NLS-HA |
| IB43_pCMV-HA-NLS-TnsAB_E62Q | SEQ ID NO: 730 | IB43_TnsAB mutant |
| IB43_pCMV-HA-NLS-TnsAB_D104N | SEQ ID NO: 731 | IB43_TnsAB mutant |
| IB43_pCMV-HA-NLS-TnsAB_K119Q | SEQ ID NO: 732 | IB43_TnsAB mutant |
| IB43_pCMV-HA-NLS-TnsAB_D519N | SEQ ID NO: 733 | IB43_TnsAB mutant |
| IB43_pCMV-HA-NLS-TnsAB_D588N | SEQ ID NO: 734 | IB43_TnsAB mutant |
| IB43_pCMV-HA-NLS-TnsAB_E624Q | SEQ ID NO: 735 | IB43_TnsAB mutant |
| IB43_pCMV-HA-NLS-TnsC_H164A | SEQ ID NO: 736 | IB43_TnsC mutant |
| IB43_pCMV-HA-NLS-TnsC_H164I | SEQ ID NO: 737 | IB43_TnsC mutant |
| IB43_pCMV-HA-NLS-TnsC_H164L | SEQ ID NO: 738 | IB43_TnsC mutant |
| IB43_pCMV-HA-NLS-TnsC_H164V | SEQ ID NO: 739 | IB43_TnsC mutant |
| IB43_pCMV-HA-NLS-TnsC_H164W | SEQ ID NO: 740 | IB43_TnsC mutant |
| pDonor_IB43-EFS-puro-pA_6N barcode | SEQ ID NO: 741 | IB43 pDonor with 6N barcode |
| pU6-IB43_CRISPR | SEQ ID NO: 742 | IB43 pGuide backbone |
| pU6-IB43_Guide-ID78(VEGFA) | SEQ ID NO: 743 | IB43 pGuide for ID78(VEGFA) |
| pU6-IB43_Guide-ID87(B2M) | SEQ ID NO: 744 | IB43 pGuide for ID87(B2M) |
| pMIIB71_S12(EFS)_pQ8765-helper_puro | SEQ ID NO: 745 | Polycistronic expression for all IB43 components (proteins + guide) |
| S1_p8Q567-helper | SEQ ID NO: 746 | Polycistronic expression for all IB43 components (proteins + guide) |
| S2_p8Q576-helper | SEQ ID NO: 747 | Polycistronic expression for all IB43 components (proteins + guide) |
| S3_p8Q657-helper | SEQ ID NO: 748 | Polycistronic expression for all IB43 components (proteins + guide) |
| S4_p8Q675-helper | SEQ ID NO: 749 | Polycistronic expression for all IB43 components (proteins + guide) |
| S5_p8Q756-helper | SEQ ID NO: 750 | Polycistronic expression for all IB43 components (proteins + guide) |
| S6_p8Q765-helper | SEQ ID NO: 751 | Polycistronic expression for all IB43 components (proteins + guide) |
| S7_pQ8576-helper | SEQ ID NO: 752 | Polycistronic expression for all IB43 components (proteins + guide) |
| S8_pQ8576-helper | SEQ ID NO: 753 | Polycistronic expression for all IB43 components (proteins + guide) |
| S9_pQ8657-helper | SEQ ID NO: 754 | Polycistronic expression for all IB43 components (proteins + guide) |
| S10_pQ8675-helper | SEQ ID NO: 755 | Polycistronic expression for all IB43 components (proteins + guide) |
| S11_pQ8756-helper | SEQ ID NO: 756 | Polycistronic expression for all IB43 components (proteins + guide) |
| S12_pQ8765-helper | SEQ ID NO: 757 | Polycistronic expression for all IB43 components (proteins + guide) |
| S13_pQ6875-helper | SEQ ID NO: 758 | Polycistronic expression for all IB43 components (proteins + guide) |
| S14_p6875Q-helper | SEQ ID NO: 759 | Polycistronic expression for all IB43 components (proteins + guide) |

[0898] Guide sequences used in the experiments are provided in Table 13 below:

TABLE 13
Spacer Sequence by Guide ID and Locus

| Guide ID | Locus | Spacer (36 bp) | SEQ ID NO: |
|---|---|---|---|
| 1 | EMX1 | TCCTCCCCATTGGCCTGCTTCGTGGCAATGCGCCAC | 760 |
| 2 | EMX1 | TCACCTCCAATGACTAGGGTGGGCAACCACAAACCC | 761 |
| 3 | EMX1 | GGGAGGACATCGATGTCACCTCCAATGACTAGGGTG | 762 |
| 4 | EMX1 | TGATGGGAGCCCTTCTTCTTCTGCTCGGACTCAGGC | 763 |
| 5 | EMX1 | GGAGCCCTTCTTCTTCTGCTCGGACTCAGGCCCTTC | 764 |
| 6 | EMX1 | CGCCACCGGTTGATGTGATGGGAGCCCTTCTTCTTC | 765 |
| 7 | EMX1 | ACTAGGGTGGGCAACCACAAACCCACGAGGGCAGAG | 766 |
| 8 | EMX1 | AGAAACTCAGGAGGCCCCCAGAGCAGCCACTGGGGC | 767 |
| 9 | EMX1 | GGAAGACTGAGGCTACATAGGGTTAGGGGCCCCAGG | 768 |
| 10 | EMX1 | TAGCCTCAGTCTTCCCATCAGGCTCTCAGCTCAGCC | 769 |
| 11 | EMX1 | GGAGCAGCTGGTCAGAGGGGACCCCGGCCTGGGGCC | 770 |
| 12 | EMX1 | TTAGACCCATGGGAGCAGCTGGTCAGAGGGGACCCC | 771 |
| 13 | DNMT1 | TTAACAGCTGACCCAATAAGTGGCAGAGTGCTAAGG | 772 |
| 14 | DNMT1 | TTTCCTGATGGTCCATGTCTGTTACTCGCCTGTCAA | 773 |
| 15 | DNMT1 | GTCCATGTCTGTTACTCGCCTGTCAAGTGGCGTGAC | 774 |
| 16 | DNMT1 | GACCATCAGGAAACATTAACGTACTGATGTTAACAG | 775 |
| 17 | DNMT1 | TCTGTTACTCGCCTGTCAAGTGGCGTGACACCGGGC | 776 |
| 18 | DNMT1 | TTGGGGATTCCTGGTGCCAGAAACAGGGGTGACGGG | 777 |
| 19 | DNMT1 | CACTGATGTTGTGTTTTTAACATGTCAATCTGTCCG | 778 |
| 20 | DNMT1 | TTGTGTTTTTAACATGTCAATCTGTCCGTTCACATG | 779 |
| 21 | DNMT1 | TTAAAAACACAACATCAGTGCATGTTGGGGATTCCT | 780 |
| 22 | DNMT1 | TCAATCTGTCCGTTCACATGTGTGGTACATGGTGTT | 781 |
| 23 | DNMT1 | TGTGGTACATGGTGTTTGTGGCCTTGGCTGACATGA | 782 |
| 24 | DNMT1 | ATTTAGTGATCAAATTGTGCAGTACTTTGTGCATTC | 783 |
| 25 | CXCR4 | CAGCCACTGGAACGCTCTTTCCAGTCGTTTCTCCTC | 784 |
| 26 | CXCR4 | TAACTCGCTCCAAGACATCCCCGCTTCCCCAAGGAA | 785 |
| 27 | CXCR4 | GGAAGCCACCCGGGAGAGTGAGGAAATGAAACTTGG | 786 |
| 28 | CXCR4 | GTTTGTATTTAGGCAGGCGTGGGAAAATTAAGTTTT | 787 |
| 29 | CXCR4 | AAGTCACTATGGGAAAAGATGGGGAGGAGAGTTGTA | 788 |
| 30 | CXCR4 | CTAATTTCAATAAAATCTTCCTGCCCACCATCTACT | 789 |
| 31 | CXCR4 | CTTCTCAGTTTCTTCTGGTAACCCATGACCAGGATG | 790 |
| 32 | CXCR4 | TCATCTACACAGTCAACCTCTACAGCAGTGTCCTCA | 791 |
| 33 | CXCR4 | AAGTCGGGAATAGTCAGCAGGAGGGCAGGGATCCAG | 792 |
| 34 | CXCR4 | ACAGATATATCTGTGACCGCTTCTACCCCAATGACT | 793 |
| 35 | CXCR4 | ATGTGCTGAAACTGGAACACAACCACCCACAAGTCA | 794 |
| 36 | CXCR4 | TTCTTACGTTTGCAAACAGCGTGCAAGCCGCCGCGC | 795 |
| 37 | AAVS1 | GGGCTTTTCTGTCACCAATCCTGTCCCTAGTGGCCC | 796 |
| 38 | AAVS1 | TGGCTCTGGTTCTGGGTACTTTTATCTGTCCCCTCC | 797 |
| 39 | AAVS1 | GCTCCAGGAAATGGGGGTGTGTCACCAGATAAGGAA | 798 |
| 40 | AAVS1 | GGGGTGTGTCACCAGATAAGGAATCTGCCTAACAGG | 799 |
| 41 | AAVS1 | TTTGCTGCCTCCAGGGATCCTGTGTCCCCGAGCTGG | 800 |
| 42 | AAVS1 | TCCACTTCAGGACAGCATGTTTGCTGCCTCCAGGGA | 801 |
| 43 | CCR5 | TGACAGTTCCTGCCCAGTTCCCTCCTGTGGTAGCCA | 802 |
| 44 | CCR5 | CCCTCACTCGCTTCCCCACCAATCCTGCCCACTTCT | 803 |
| 45 | CCR5 | GATTGTAGAAGTGGGCAGGATTGGTGGGGAAGCGAG | 804 |
| 46 | CCR5 | ACAGCACCAGCCCTGTATCCACACCCATCACATCAA | 805 |
| 47 | CCR5 | ACTGACATCTACCTGCTCAACCTGGCCATCTCTGAC | 806 |
| 48 | CCR5 | TCAGTCATGCTCTTCAGCCTTTTGCAGTTTATCAGG | 807 |
| 49 | SLC35A2 | AATAGCCCCGGGATTTCCAAATTCCGTCGGATCGGG | 808 |
| 50 | SLC35A2 | GGAGGCGGAGGTCGGGATCGCTGGGAGTCGGGAATG | 809 |
| 51 | SLC35A2 | CGGAAGGATCCCACAATCACTCTCAGAATGTTCTCT | 810 |
| 52 | SLC35A2 | TGACTAGAGAGGGTCCATTTTGAGGATGGGGGTGTC | 811 |
| 53 | SLC35A2 | TGGGAATCATTTCTTGTATTTAGTAGACTATTCTGG | 812 |
| 54 | SLC35A2 | AGTCTATTGAGGTAATCCATAGAAATCCCTTAACCC | 813 |
| 55 | SLC35A2 | GCTGAGGCAGTAAGCCGGTAGGAGTCAGACCCTTAT | 814 |
| 56 | SLC35A2 | CCCCAGCGGCTTCTGACCCCGTCCTTCCCCCTTGCC | 815 |
| 57 | SLC35A2 | CTTATAAAGTAGCAGGGATCTCTCACATGTGATTTA | 816 |
| 58 | SLC35A2 | GTGAAACCCCGTCTCTACTAAAAATACAAAAATTAT | 817 |
| 59 | SLC35A2 | CTCTGTGATTAGCAGACACGGATGGCTGATTCTTTT | 818 |
| 60 | SLC35A2 | CTAGGATACTTAAAAGAAATAATACCTGTGAAGAGC | 819 |
| 61 | EMX1 | GAGAGGGCAGGGCGCTTGGGAGCAGGGCGCGAGGCC | 820 |
| 62 | EMX1 | GGGGCCTTTTGGAACCCAGCAGGGCTGGGCTGGGGC | 821 |
| 63 | EMX1 | CAAACTGTATCCCGAGCCCGGCTCCCAAAGCTCCTC | 822 |
| 64 | EMX1 | TCTGGTAATGGTTATCTATTATTGGCTCTGGCTTTG | 823 |
| 65 | EMX1 | GTTATCTATTATTGGCTCTGGCTTTGTCTTCTCTCT | 824 |
| 66 | EMX1 | ACACAAATTCCAGGGTTTTTTCTAGTGCTGAGTTTC | 825 |
| 67 | EMX1 | TAGAGGAGTCACAGAAACTCAGCACTAGAAAAAACC | 826 |
| 68 | EMX1 | ATAGGCAGGGGTTGTGTGGTGAGCTCTGAGAATGTG | 827 |
| 69 | EMX1 | TCCCTGCCTCTAGAGAGATGCCTACTTGACCCCAGT | 828 |
| 70 | EMX1 | GAGAAAATATTCAGAATCACCTTTCACTTGGGTGCC | 829 |
| 71 | EMX1 | GCGACTTCAGGCACAGGATAGGCCAGAGGCAGCTTC | 830 |
| 72 | EMX1 | CTGCCCTTGACTAGCAACACTGGCTCAAAGAAGGAA | 831 |
| 73 | VEGFA | CCCATGCCTTGCTCTCTTTCTGTCCTCAGTGGTCCC | 832 |
| 74 | VEGFA | GCAGAAGGAGGAGGGCAGAATCATCACGAAGGTGAG | 833 |
| 75 | VEGFA | GGGTTCCCTGTCCTCTCAGGGGATGGGTGGATGGCC | 834 |
| 76 | VEGFA | ATTCTGCCCTCCTCCTTCTGCCATGGGTGCAGCCTG | 835 |
| 77 | VEGFA | GGTGCAGCCTGGGACCACTGAGGACAGAAAGAGAGC | 836 |
| 78 | VEGFA | GGTGGATGGCCTAATTCCTTTTTCTTCAGAACTGTG | 837 |
| 79 | VEGFA | TCCACTCTCCCCTGGGAGCTAGGGGAAACAAGGGAC | 838 |
| 80 | VEGFA | TCCCATTTGTGGGAACTGTGACCCTTCCTGTGTGAG | 839 |
| 81 | VEGFA | GGACATGTCTATATAGGAAATGACACTAAATGTCCA | 840 |
| 82 | VEGFA | GGATCTCTCCTCCCTTCCCTGGTTTGCATTCCTTTG | 841 |
| 83 | VEGFA | CAAACCAGGGAAGGGAGGAGAGATCCCATTAGGCTG | 842 |
| 84 | VEGFA | GGGTTTTCTCCACCCCCAAAGGAATGCAAACCAGGG | 843 |
| 85 | B2M | CCTTCTTAAACATCACGAGACTCTAAGAAAAGGAAA | 844 |
| 86 | B2M | CCCGCCAGCGCGACGCCTCCACTTATATTAAACGCG | 845 |
| 87 | B2M | CTGTCAGCTTCAGGAATGCCCGCCAGCGCGACGCCT | 846 |
| 88 | B2M | TAGACTCTTGAGTGATGTGTTAAGGAATGCTATGAG | 847 |
| 89 | B2M | TGTTAAGGAATGCTATGAGTGCTGAGAGGGCATCAG | 848 |
| 90 | B2M | CCCTCTCAGCACTCATAGCATTCCTTAACACATCAC | 849 |
| 91 | B2M | CAGCGCAATCTCCAGTGACAGAAGATACTGCTAGAA | 850 |
| 92 | B2M | CCTTTTTTGTTTTTTTTCTAGCAGATTTCTAGCAGT | 851 |
| 93 | B2M | AGCTTCCACCTTCCCAACAAGCCACCTCCATTTTGA | 852 |
| 94 | B2M | GAGGTAAGTTTTTGACCTTGAGAAAATGTTTTTGTT | 853 |
| 95 | B2M | ACCCTGTAGGATTCTTCTTTCCCTGCTAAAATGTTA | 854 |
| 96 | B2M | TTCCCTTCTCCTGTGGAGTGGCATGAAGAAGGTGTA | 855 |

TABLE 14
CAST IB2 Orthologs

| IB No | Subtype | Contig Name |
|---|---|---|
| 3 | 2 | 279776\|206\|23HNCmetaG_2_$F_3300034024\|Ga0334927_000207\|60215\|Ga0334927_000207 |
| 4 | 2 | 279824\|185\|45SNCmetaG_2_$F_3300034027\|Ga0334949_000186\|34686\|Ga0334949_000186 |
| 7 | 2 | 39994\|0\|GCA_000021805.1_ASM2180v1_genomic\|CP001287.1\|4679413\|Cyanothece |
| 16 | 2 | 98561\|0\|GCA_001548375.1_ASM154837v1_genomic\|AP017295.1\|6463965\|Nostoc |
| 20 | 2 | 127640\|11\|GCA_002246015.1_ASM224601v1_genomic\|NOLJ01000002.1\|1002138\|Nostoc |
| 21 | 2 | 132849\|0\|GCA_002355455.1_ASM235545v1_genomic\|AP017375.1\|5319768\|Stanieria |
| 25 | 2 | 133461\|0\|GCA_002368155.1_ASM236815v1_genomic\|AP018180.1\|8352649\|Nostoc |
| 27 | 2 | 133452\|0\|GCA_002367975.1_ASM236797v1_genomic\|AP018174.1\|6565356\|Anabaenopsis |
| 32 | 2 | 134231\|304\|GCA_002385315.1_ASM238531v1_genomic\|DGDG01000331.1\|46054\|TPA_asm: |
| 34 | 2 | 151687\|0\|GCA_002896875.1_ASM289687v1_genomic\|CP023278.1\|6990729\|Nostoc |
| 36 | 2 | 167662\|124\|GCA_003326195.1_ASM332619v1_genomic\|LXQE01000125.1\|290315\|Nostoc |
| 42 | 2 | 311307_0\|304\|20190125_33_FD_$F_3300036444\|Ga0401347_0305\|62262\|Ga04 01347_0305 |
| 43 | 2 | 330460_0\|0\|GCA_011769525.1_ASM1176952v1_genomic\|CP050440.1\|8479123\| |
| | | Tolypothrix_sp._PCC_7910_chromosome,_complete_genome |
| 45 | 2 | Gloeothece verrucosa PCC 7822 plasmid Cy782202, complete sequence |
| 46 | 2 | Nostoc sp. C052 chromosome, complete genome |
| 47 | 2 | Stanieria sp. NIES-3757 DNA, complete genome |
| 48 | 2 | Rippkaea orientalis PCC 8801, complete sequence |
| 49 | 2 | Nostoc sp. NIES-2111 DNA, nearly complete genome |

### Example 3—RNA-Guided DNA Insertion in Human Cells by Type 1-B CRISPR-Associated Transposase

### Main Text

[0899] Molecular technologies to read the human genome have burgeoned over the past decade, advancing nearly all fronts of the life sciences, but technologies to write new DNA sequences into the human genome remain limited. The ability to efficiently insert large DNA cargoes into desired sites in the human genome would enable rapid creation of genetic knock-ins without relying on endogenous cellular machinery and open up new therapeutic possibilities for curing genetic disorders. Here Applicants demonstrated that the microbial CRISPR-associated transposon (CAST) systems can be engineered to achieve targeted insertion of a DNA cargo into the human genome.

[0900] CAST systems consist of two modules: the core Tn7-like transposon machinery (TnsA, TnsB, and TnsC) and a CRISPR system (FIG. 61A) responsible for guiding the transposition activity. CAST systems are classified into subtypes (V-K, I-F, and I-B) depending on the type of CRISPR system they harbor (Strecker et al. 2019; Klompe et al. 2019; Saito et al. 2021; Peters et al. 2017). Previous work has shown that CAST systems can be programmed for RNA-guided DNA insertion in bacteria, and Tn7 transposition activity has been shown in vitro on extracted human genomic DNA (Kuduvalli et al. 2005) (FIG. 61A). However, it is not known whether Tn7 or CAST systems can mediate transposition in human cells. In the present study Applicants engineered CAST to achieve RNA-guided DNA transposition in human cells.

[0901] Applicants chose to focus on the type I-B system, which consists of Tn7-like transposase genes (TnsA, TnsB, TnsC, TnsD, and TniQ) and type I-B CRISPR proteins (Cas5, Cas6, Cas7, and Cas8, collectively known as Cascade), and have been reported to achieve unidirectional DNA insertion in bacterial cells (Saito et al. 2021), an important attribute for maximizing the accuracy of the insertion outcome. I-B CAST systems are further subdivided into I-B1 and I-B2 subtypes, with I-B2 containing a fusion of the core transposon genes tnsA and tnsB (denoted as tnsAB) (Saito et al. 2021).

[0902] To identify candidates for function in human cells, Applicants developed a systematic screening pipeline using human cells to test 30 type I-B orthologs (FIG. 61B, Table 15). CAST systems, like CRISPR systems, typically require a protospacer adjacent motif (PAM) to recognize target DNA (Deveau et al. 2008). Applicants thus first screened the 30 systems to determine the PAM for each system directly in HEK293FT cells (FIG. 61C). Applicants synthesized human codon-optimized CAST genes (cas5, cas6, cas7, cas8, tniQ, tnsA, tnsB, tnsAB, and tnsC) for each of the 30 I-B systems and separately cloned them under a CMV promoter. Applicants created two versions of each gene, one tagged with a nuclear localization signal (NLS) at the N-terminus and the other with a C-terminus NLS (hereafter pHelper plasmids, Table 16). Applicants did not include the target selector protein TnsD in the PAM screen, as TnsD in I-B systems enables homing transposition to the host bacterial genome, but impairs RNA-guided transposition activity in E. coli (Saito et al. 2021).

[0903] In addition to the transposase and CRISPR proteins, Applicants also designed guide RNA expression plasmids (pGuide, Table 16), transposon donor plasmids (pDonor), and transposition target plasmids (pTarget). For pGuide, a minimal CRISPR array was designed for each candidate CAST system consisting of a spacer (PSP1) flanked by two direct repeats (DRs) from the corresponding system and expressed under a U6 promoter (pGuides, Table 16). pDonors for each system were constructed by cloning the predicted transposon right end (RE) and left end (LE) sequences of each ortholog into a pDonor plasmid with a 0.7-kb cargo sequence (Table 16). pTarget plasmids are a library containing a 6N motif upstream of a synthetic target sequence matching the spacer encoded by pGuide.

[0904] To test whether CAST can mediate RNA-guided transposition from pDonor to pTarget in human cells, thereby forming the insertion product (pInsert), Applicants co-transfected HEK293FT cells with all pHelpers (16 plasmids for I-Bl systems: N-term or C-term NLS tagged tnsA, tnsB, tnsC, tniQ, cas5, cas6, cas7, and cas8; 14 plasmids for I-B2 systems: N-term or C-term NLS tagged tnsAB, tnsC, tniQ, cas5, cas6, cas7, and cas8), pDonor, pGuide, and the pTarget library. After incubation for 2 days, Applicants extracted DNA from co-transfected HEK293FT cells, amplified it by PCR, and sequenced the target plasmids to identify insertions.

[0905] Six out of the 30 CAST systems tested were able to form pInsert in HEK293FT cells, three I-B1 orthologs (Anabaena variabilis ATCC 29413 (AvCAST), Anabaena sp. CA=ATCC33047 (AnCAST), and Nostoc sp. NIES-2111 (NosCAST)) and three I-B2 orthologs (Peltigera membranacea cyanobiont 210A (PmcCAST), Nostoc desertorum CM1-VF14 (NdCAST) and Tolypothrix sp. PC (7910 (TolCAST)), indicating these six systems can achieve RNA-guided DNA integration in human cells. All six of these active I-B orthologs have clear 5′ ATG PAMs, and their insertion sites are mainly in a 70- to 100-bp window downstream of the PAM (FIGS. 61D and 15).

[0906] To further confirm successful RNA-guided transposition, Applicants performed a new transposition experiment in HEK293FT cells using a new donor plasmid harboring an R6K origin (pDonor_{(R6K)}, FIG. 61E), so that Applicants can detect fully inserted transposons. Since R6K origin-containing plasmids depend on the presence of Pir1 in E. coli for replication, including an R6K origin in pDonor_{(R6K)} allows positive selection for fully formed pInsert plasmids using Pir1 (minus) cells. Successful transposition in HEK293FT cells would allow the KanR resistance gene from pDonor_{(R6K)} to be inserted into the CmR resistant pTarget plasmid to form a KanR/CmR dual resistant pInsert plasmid without the R6K origin.

[0907] For the six active CAST systems, Applicants transfected pHelpers (16 plasmids for I-Bl systems and 14 plasmids for I-B2 systems), pDonor_{(R6K)}, pGuide, and a pTarget with the most preferred PAM into HEK293FT cells to carry out the transposition experiment. Applicants extracted plasmid DNA from the transfected HEK293FT cells 48 hours later and electroporated the extracted DNA into Δpir1 E. coli. Sequencing of plasmid DNA from KanR/CmR double resistant colonies revealed appropriately formed pInsert plasmids with target site duplications (TSDs), which were also observed in previous bacterial CAST experiments (FIG. 61F). Successful recovery of pInsert was only obtained for TolCAST but not for the other five orthologs, therefore Applicants focused on TolCAST for subsequent experiments.

[0908] To quantify TolCAST-mediated insertion, Applicants generated new donor plasmids with unique molecular identifiers (UMIs) inserted into the transposon donor, pDonor (MI) (FIG. 62A), enabling the ability to count the number of transposition events. To test whether TolCAST can mediate RNA-guided transposition into the human genome in live cells, Applicants designed 96 guide RNAs, targeting 8 human genomic loci (EMX1, DNMT1, CXCR4, AAVS1, CCR5, SL (35A2, VEGFA, and B2M, Table 16). Applicants transfected HEK293FT cells with TolCAST pHelpers (14 plasmids), pDonor (UMI), and pGuide and analyzed transposition events 48 hours later. Sequencing of the targeted loci confirmed that TolCAST can insert into 70 out of 96 target sites with up to 1055 unique insertion reads (UIRs) at a single site (FIGS. 62B and 64).

[0909] To simplify expression of all of the transposase and Cas genes, Applicants designed an optimized, single polycistronic pHelper (pPolyHelper) expression vector. Applicants first identified the optimal NLS-tagging position for each component by systematically testing all 128 combinations (N- or C-term NLS tagging for each of the 7 TolCAST proteins), finding that C-terminal NLS-tagging of TnsAB or TnsC significantly impairs DNA insertion activity (FIG. 62C). NLS-tagging position for other TolCAST proteins did not affect activity (FIGS. 65A and 65B). In parallel, Applicants also optimized the amount of each pHelper plasmid used in co-transfection, and identified that the amount of TnsAB and TnsC plasmids should be less than the amount used for TniQ and Cascade components (FIGS. 62D, 65C and 65D). Indeed, across the 96 target sites. the optimized transfection condition (N-term NLS tagged Cas5, Cas6, Cas7, Cas8, TnsAB, TnsC, TniQ, where TnsAB and TnsC was each 1% of the total mass of transfected DNA and the remaining plasmids were each 19.6% of the total mass of transfected DNA) resulted in a ˜3-fold UIR increase over the unoptimized condition (N-term as well as C-term NLS tagged Cas5, Cas6, Cas7, Cas8, TnsAB, TnsC, TniQ where the same mass was transfected for all plasmids) (FIG. 66). Based on these results, Applicants then designed pPolyHelper, in which all seven N-terminal NLS-tagged TolCAST proteins were expressed on a single polycistronic vector connected by P2A ribosomal skipping sequences. Since TnsAB and TnsC cannot tolerate C-terminal fusion, Applicants put TnsAB and TnsC as the last gene in the two polycistronic expression cassettes so that no additional polypeptides are attached to the C-termini of these two proteins. Applicants tested 14 permutations of pPolyHelper, in which Applicants systematically varied the order of the Cascade genes and tniQ (FIG. 62E). Although the UIRs achieved using pPolyHelper was lower than co-transfection of monocistronic pHelpers, this experiment shows the TolCAST system can be reconstituted with two plasmids (pPolyHelper and pDonor) in human cells (FIG. 62E) and further optimization will be able to improve this approach.

[0910] Finally, Applicants explored mRNA-mediated expression of the TolCAST components to minimize the expression duration of the transposase and Cascade components. Similar to plasmid mediated expression of TolCAST, in vitro transcribed mRNA was also able to mediate RNA-guided transposition at the B2M target site (FIG. 62F).

[0911] The programmable nature of RNA-guided systems, such as CRISPR-Cas, lend themselves to development as modular technologies that can be rapidly adapted for a wide range of contexts. Here, Applicants have shown that another such system, CAST, can be engineered for programmable gene insertion in the human genome. Continued optimization of TolCAST as well as exploration of additional CAST diversity will likely improve the efficiency and versatility of CAST systems for use in genome engineering applications.

### Online Methods

### Phylogenetic Analysis of I-B Orthologs Tested in Human Cells

[0912] TnsC was extracted from all contigs plus TnsC from E. coli (Tn7). All TnsC orthologs were aligned using MAFFT (v. 7.490) (Katoh and Standley 2013) with einsi algorithm (Katoh et al. 2005). Gaps in the alignment were removed using trimal with gappyout parameter. Phylogenetic tree reconstruction was done with iqtree software (Nguyen et al. 2015; Anisimova et al. 2011); JTT+F+G4 model was selected to be the best model by iqtree (Kalyaanamoorthy et al. 2017). Ultrafast bootstrap (Hoang et al. 2018) values were estimated via iqtree (options-s tree-alrt 1000-bb 1000). Tree visualization was done via Interactive Tree of Life (iTOL) (Letunic and Bork 2021).

### Plasmid Construction

[0913] The computational biodiscovery of CAST I-B orthologs was described in a previous study (Saito et al. 2021). Orthologs used in this study are listed in Table 15. All plasmids used in this study are described in Table 16. For pHelper, the coding sequences of CAST protein components (Cas5, Cas6, Cas7, Cas8, TniQ, TnsA, TnsB, TnsAB, and TnsC) were subjected to codon optimization by GeneArt (Thermo Fisher) for expression in human cells and synthesized (Twist Bioscience and GENEWIZ). Human codon optimized gene fragments were cloned into pCMV with an HA epitope tag and a nuclear localization signal (NLS). To create pGuide, two direct repeats (DRs) from the CRISPR array of each candidate ortholog with appropriate spacers (giving a minimal CRISPR array) were cloned under the U6 promoter. For pDonor, gene fragments encoding both transposon right end (RE) and left end (LE) were cloned into pUC57 with a chloramphenicol resistance gene (CmR) (GENEWIZ). pTarget containing a 6N motif upstream of the protospacer 1 (PSP1) sequence was described in previous studies (Strecker et al. 2019; Saito et al. 2021). The RE and LE of TolCAST were cloned into R6K origin plasmid (Addgene #127924) to construct R6K origin pDonor for TolCAST. For unique insertion reads (UIRs) quantification, 6N unique molecular identifiers (UMIs) were introduced into the left end of pDonor by Gibson assembly. The Gibson assembly product was electroporated into Endura electrocompetent cells (Lucigen), and the library was prepped from 50000 E. coli colonies to ensure the diversity of the 6N UMIs. Polycistronic TolCAST expression vector (pHelper₍ₚ₎) was cloned using Golden Gate assembly.

### Mammalian Cell Culture and Transfection

[0914] Mammalian cell culture experiments were performed in the HEK293FT cell line (Thermo Fisher catalog no. R70007) grown in Dulbecco's modified Eagle medium with high glucose, sodium pyruvate, and GlutaMAX (Thermo Fisher), and additionally supplemented with 10% fetal bovine serum (VWR Seradigm). All transfections were performed with Lipofectamine 3000 (Thermo Fisher) in 96-well plates unless otherwise noted. Cells were plated at approximately 20,000 cells per well 16-20 hours before transfection to ensure 90% confluency at the time of transfection. For each well on the plate, transfection plasmids were combined with OptiMEM Reduced Serum Medium (Thermo Fisher) to a total of 5 μl and mixed with 0.2 μl of P3000 reagent. Separately, 5 μl of OptiMEM was combined with 0.3 μl of Lipofectamine 3000 reagent. Plasmid and Lipofectamine solutions were then combined, incubated at room temperature for 10 minutes, and pipetted onto cells.

### PAM Screen for CAST Orthologs in Human Cells

[0915] HEK293FT cells were co-transfected with individual N-terminal HA-NLS tagged CAST I-B1 component (5 ng Cas5, 5 ng Cas6, 5 ng Cas7, 5 ng Cas8, 5 ng TniQ, 5 ng TnsA, 5 ng TnsB, and 5 ng TnsC), each C-terminal NLS-HA tagged component (5 ng Cas5, 5 ng Cas6, 5 ng Cas7, 5 ng Cas8, 5 ng TniQ, 5 ng TnsA, 5 ng TnsB, and 5 ng TnsC), pGuide targeting protospacer 1 (PSP1) (20 ng), pDonor (10 ng) and pTarget (10 ng) in 96-well plates. For CAST I-B2, 5 ng of TnsAB was used instead of TnsA and TnsB. After 2 days incubation at 37° C., the supernatant was removed, and cells were resuspended in 40 μL QuickExtract DNA Extraction Solution (Lucigen) and cycled at 65° C. for 15 min, 68° C. for 15 min then 95° C. for 10 min to lyse cells. 2 μL of lysate was used as the template for each 12.5-μl PCR reaction. Insertion products containing the 6N sequence were amplified with NEBNext High-Fidelity 2×PCR Master Mix (NEB) under the following thermal cycling conditions: 1 cycle, 98° C., 30 sec; 20 cycles, 98° C., 10 sec, 65° C., 20 sec, 72° C., 30 sec; 1 cycle, 72° C., 30 sec; 4° C. hold. 1 μL of this first PCR product was used for the template for each 10-μl second PCR reaction, with the following thermal cycling conditions: 1 cycle, 98° C., 30 sec; 15 cycles, 98° C., 10 sec, 63° C., 20 sec, 72° C., 30 sec; 1 cycle, 72° C., 30 sec; 4° C. hold (total 35 cycles for first and second PCR reactions). Amplicons were sequenced using a MiSeq Reagent Kit v2, 300-cycle (Illumina). PAM and insert position were characterized with a previously published pipeline (Strecker et al. 2019).

### R6K Origin Plasmid Transposition Assay in Human Cells

[0916] HEK293FT cells in 6-well plates were co-transfected with pHelpers, pGuide targeting PSP1, pDonor, and pTarget in the same proportion as described for the 96-well transfection. R6K origin pDonor and pTarget with an ATG PAM sequence (Addgene) were used instead of the pDonor and pTarget vectors used in the PAM screen. Cells were harvested 2 days after incubation at 37° C. by trypsinization and subjected to mini-prep by QIAprep Spin Miniprep Kit (Qiagen). To recover transposed products, the mini-prep product was concentrated under laminar air flow and electroporated into Endura Competent Cells (Lucigen). Cells were recovered for 1 hour and then plated on 50 μg/ml kanamycin and 50 μg/ml chloramphenicol containing LB-agar plates, and further incubated at 37° C. for a day. Donor insertion on pTarget was confirmed by whole plasmid sequencing after Tn5 tagmentation (Schmid-Burgk et al. 2020) for mini-prep products of 96 colonies.

### Human Genome Targeting by CAST

[0917] HEK293FT cells were co-transfected, and the lysate was prepared following the method described above. 2 μL of lysate was used as the template for each 12.5-μl PCR reaction. Insertion products containing the 6N UMIs were amplified with NEBNext High-Fidelity 2×PCR Master Mix (NEB) under the following thermal cycling conditions: 1 cycle, 98° C., 30 sec; 20 cycles, 98° C., 10 sec, 65° C., 20 sec, 72° C., 30 sec; 1 cycle, 72° C., 30 sec; 4° C. hold. 1 μL of this first PCR product was used for the template for each 10-μl second PCR reaction, run under the following thermal cycling conditions: 1 cycle, 98° C., 30 sec; 20 cycles, 98° C., 10 sec, 63° C., 20 sec, 72° C., 30 sec; 1 cycle, 72° C., 30 sec; 4° C. hold (total 40 cycles for first and second PCR reactions). Amplicons were sequenced using a MiSeq Reagent Kit v2, 300-cycle (Illumina). Insert position and UIRs were characterized and quantified using a previously published pipeline.

TolCAST mRNA Helper Transfection

[0918] Each N-terminal HA-NLS tagged TolCAST protein component (Cas5, Cas6, Cas7, Cas8, TniQ, TnsAB, and TnsC) was cloned under a T7 promoter. The T7 promoter construct was used as a template for the HiScribe T7 ARCA mRNA kit (NEB). To increase the stability of mRNAs, Pseudouridine-5′-Triphosphate was spiked into the reaction. In vitro transcribed mRNAs were purified using a Monarch RNA Cleanup Kit (NEB). HEK293FT cells in 12-well plates were co-transfected with appropriate pDonor and pGuide by Lipofectamine 3000 as described above. After 6 hours incubation at 37° C., the culture medium was carefully replaced by fresh medium, and the cells were co-transfected with 100 ng mRNA for each TolCAST component (in total 700 ng) by TransIT-mRNA Transfection Kit (Mirus). Cells were further incubated at 37° C. for 2 days followed by downstream deep-sequencing analysis as described above.

TABLE 15A
Type I-B CAST orthologs tested in this study - CAST I-B orthologs active in
human cells

| Identification | | | Native locus sequence |
|---|---|---|---|
| name | Subtype | Description | (RE to LE) |
| AvCAST | I-B1 | 42513\|0\|GCA_000204075.1_ | SEQ ID NO: 856 |
| | | ASM20407v1_genomic\| | |
| | | CP000117.1\|6365727\|Anabaena | |
| AnCAST | I-B1 | 100521\|34\|GCA_001597855.1_ | SEQ ID NO: 857 |
| | | ASM159785v1_genomic\| | |
| | | LUHI01000035.1\|201628\|Anabaena | |
| NosCAST | I-B1 | 133464\|0\|GCA_002368215.1_ | SEQ ID NO: 858 |
| | | ASM236821v1_genomic\| | |
| | | AP018184.1\|6522801Nostoc | |
| PmcCAST | I-B2 | 127640\|11\|GCA_002246015.1_ | SEQ IDNO: 859 |
| | | ASM224601v1_genomic\| | |
| | | NOLJ01000002.1\|1002138\|Nostoc | |
| NdCAST | I-B2 | 311307_0\|304\|20190125_33_FD_ | SEQ ID NO: 860 |
| | | $F_3300036444\|Ga0401347_0305\| | |
| | | 62262\Ga04013470_305 | |
| TolCAST | I-B2 | 330460_0\|0\|GCA_011769525.1_ | SEQ ID NO: 861 |
| | | ASM1176952v1_genomic\| | |
| | | CP05044.01\|8479123\| | |
| | | Tolypothrix_sp._PCC_7910_ | |
| | | chromosome,_complete_genome | |

| | | | | | Spacer | |
|---|---|---|---|---|---|---|
| Identification | | | | Direct repeat | length | |
| name | Description | RE | LE | (DR) | (bp) | PAM |
| AvCAST | 42513\|0\|GCA_000204075.1_ | SEQ ID NO: 862 | SEQ ID NO: 863 | SEQ ID NO: 864 | 37 | AT |
| | ASM20407v1_genomic\| | | | | | |
| | CP000117.1\|6365727\|Anabaena | | | | | |
| AnCAST | 100521\|34\|GCA_001597855.1_ | SEQ ID NO: 865 | SEQ ID NO: 866 | SEQ ID NO: 867 | 35 | ATG |
| | ASM159785v1_genomic\| | | | | | |
| | LUHI01000035.1\|201628\|Anabaena | | | | | |
| NosCAST | 133464\|0\|GCA_002368215.1_ | SEQ ID NO: 868 | SEQ ID NO: 869 | SEQ ID NO: 870 | 36 | ATG |
| | ASM236821v1_genomic\| | | | | | |
| | AP018184.1\|6522801Nostoc | | | | | |
| PmcCAST | 127640\|11\|GCA_002246015.1_ | SEQ ID NO: 871 | SEQ ID NO: 872 | SEQ ID NO: 873 | 35 | ATG |
| | ASM224601v1_genomic\| | | | | | |
| | NOLJ01000002.1\|1002138\|Nostoc | | | | | |
| NdCAST | 311307_0\|304\|20190125_33_FD_ | SEQ ID NO: 874 | SEQ ID NO: 875 | SEQ ID NO: 876 | 36 | ATG |
| | $F_3300036444\|Ga0401347_0305\| | | | | | |
| | 62262\Ga04013470_305 | | | | | |
| TolCAST | 330460_0\|0\|GCA_011769525.1_ | SEQ ID NO: 877 | SEQ ID NO: 878 | SEQ ID NO: 879 | 36 | ATG |
| | ASM1176952v1_genomic\| | | | | | |
| | CP05044.01\|8479123\| | | | | | |
| | Tolypothrix_sp._PCC_7910_ | | | | | |
| | chromosome,_complete_genome | | | | | |

TABLE 15B
Cont. Type I-B CAST orthologs tested in this study-
Other CAST I-B orthologs tested in human cells

| | | RE side for | LE side for | | |
|---|---|---|---|---|---|
| | | cloning | cloning | | Tested |
| Identifi- | | (predicted | (predicted | | spacer |
| cation | | RE + | LE + | Tested | length |
| name | Description | extension) | extension) | DR | (bp) |
| IB5 | 1745\|30\|NNBU01.1\| | SEQ ID NO: | SEQ ID NO: | SEQ ID NO: | 35 |
| | NNBU01000031.1\| | 904 | 905 | 906 | |
| | 187002\|Plant | | | | |
| IB24 | 133461\|0\|GCA_ | SEQ ID NO: | SEQ ID NO: | SEQ ID NO: | 36 |
| | 002368155.1_ | 907 | 908 | 909 | |
| | ASM236815v1_ | | | | |
| | genomic\|AP018180.1\| | | | | |
| | 8352649\|Nostoc | | | | |
| IB35 | 153862\|0\|GCA_ | SEQ ID NO: | SEQ ID NO: | SEQ ID NO: | 33/34 |
| | 002949735.1_ | 910 | 911 | 912 | |
| | ASM294973v1_ | | | | |
| | genomic\|CP026681.1\| | | | | |
| | 8214648\|Nostoc | | | | |
| IB39 | Nostoc sp. ‘Peltigera | SEQ ID NO: | SEQ ID NO: | SEQ ID NO: | 35 |
| | membranacea | 913 | 914 | 915 | |
| | cyanobiont’ 232 | | | | |
| | scaffold49, whole | | | | |
| | genome shotgun | | | | |
| | sequence | | | | |
| IB3 | 279776\|206\|23HNCmetaG_ | SEQ ID NO: | SEQ ID NO: | SEQ ID NO: | 39 |
| | 2_$F_3300034024\| | 916 | 917 | 918 | |
| | Ga0334927_000207\|60215\| | | | | |
| | Ga0334927_000207 | | | | |
| IB4 | 279824\|185\|45SNCmetaG_ | SEQ ID NO: | SEQ ID NO: | SEQ ID NO: | 35 |
| | 2_$F_3300034027\| | 919 | 920 | 921 | |
| | Ga0334949_000186\|34686\| | | | | |
| | Ga0334949_000186 | | | | |
| IB8 | 39994\|0\|GCA_000021805.1_ | SEQ ID NO: | SEQ ID NO: | SEQ ID NO: | 41 |
| | ASM2180v1_genomic\| | 922 | 923 | 924 | |
| | CP001287.1\|4679413\| | | | | |
| | Cyanothece | | | | |
| IB16 | 98561\|0\|GCA_001548375.1_ | SEQ ID NO: | SEQ ID NO: | SEQ ID NO: | 38 |
| | ASM154837v1_genomic\| | 925 | 926 | 927 | |
| | AP017295.1\|6463965\|Nostoc | | | | |
| IB21 | 132849\|0\|GCA_002355455.1 | SEQ ID NO: | SEQ ID NO: | SEQ ID NO: | 35 |
| | ASM235545v1_genomic\| | 928 | 929 | 930 | |
| | AP017375.1\|5319768\| | | | | |
| | Stanieria | | | | |
| IB23 | 134231\|304\|GCA_ | SEQ ID NO: | SEQ ID NO: | SEQ ID NO: | 34/35 |
| | 002385315.1_ | 931 | 932 | 933 | |
| | ASM238531v1_genomic\| | | | | |
| | DGDG01000331.1\|46054\| | | | | |
| | TPA_asm: | | | | |
| IB25 | 133461\|0\|GCA_002368155.1_ | SEQ ID NO: | SEQ ID NO: | SEQ ID NO: | 35 |
| | ASM236815v1_genomic\| | 934 | 935 | 936 | |
| | AP018180.1\|8352649\|Nostoc | | | | |
| IB27 | 133452\|0\|GCA_002367975.1_ | SEQ ID NO: | SEQ ID NO: | SEQ ID NO: | 36 |
| | ASM236797v1_genomic\| | 937 | 938 | 939 | |
| | AP018174.1\|6565356\| | | | | |
| | Anabaenopsis | | | | |
| IB34 | 151687\|0\|GCA_002896875.1_ | SEQ ID NO: | SEQ ID NO: | SEQ ID NO: | 38 |
| | ASM289687v1_genomic\| | 940 | 941 | 942 | |
| | CP023278.1\|6990729\|Nostoc | | | | |
| IB36 | 167662\|124\| | SEQ ID NO: | SEQ ID NO: | SEQ ID NO: | 35 |
| | GCA003326195.1_ | 943 | 944 | 945 | |
| | ASM332619v1 | | | | |
| | genomic\|LXQE01000125.1\| | | | | |
| | 290315\|Nostoc | | | | |
| IB40 | 40504\|2\|GCA_000147335.1_ | SEQ ID NO: | SEQ ID NO: | SEQ ID NO: | 37 |
| | ASM14733v1_genomic\| | 946 | 947 | 948 | |
| | CP002200.1\|473846\| | | | | |
| | Cyanothece | | | | |
| IB41 | 176102\|55\|GCA_ | SEQ ID NO: | SEQ ID NO: | SEQ ID NO: | 33 |
| | 900010725.1_BBR_ | 949 | 950 | 951 | |
| | PRJEB10992_ | | | | |
| | genomic\|LN886408.1\| | | | | |
| | 225910\|Planktothrix | | | | |
| IB45 | Gloeothece verrucosa PCC | SEQ ID NO: | SEQ ID NO: | SEQ ID NO: | 37 |
| | 7822 plasmid Cy782202, | 952 | 953 | 954 | |
| | complete sequence | | | | |
| IB46 | Nostoc sp. C052 chromosome, | SEQ ID NO: | SEQ ID NO: | SEQ ID NO: | 39 |
| | complete genome | 955 | 956 | 957 | |
| IB47 | Stanieria sp. NIES-3757 | SEQ ID NO: | SEQ ID NO: | SEQ ID NO: | 35/39 |
| | DNA, complete genome | 958 | 959 | 960 | |
| IB48 | Rippkaea orientalis PCC | SEQ ID NO: | SEQ ID NO: | SEQ ID NO: | 41 |
| | 8801, complete sequence | 961 | 962 | 963 | |
| IB49 | Nostoc sp. NIES-2111 DNA, | SEQ ID NO: | SEQ ID NO: | SEQ ID NO: | 38 |
| | nearly complete genome | 964 | 965 | 966 | |
| IB53 | MAG Nostoc sp. NMS9 | SEQ ID NO: | SEQ ID NO: | SEQ ID NO: | 36 |
| | NODE_61_length 125134_ | 967 | 968 | 969 | |
| | cov_158.972, whole genome | | | | |
| | shotgun sequence | | | | |
| IB54 | Coleofasciculus sp. FACHB- | SEQ ID NO: | SEQ ID NO: | SEQ ID NO: | 36 |
| | SPT36 contig13, whole | 970 | 971 | 972 | |
| | genome shotgun sequence | | | | |
| IB55 | Chroococcus sp. FPU101 | SEQ ID NO: | SEQ ID NO: | SEQ ID NO: | 36 |
| | sequence007, whole genome | 973 | 974 | 975 | |
| | shotgun sequence | | | | |

TABLE 16A
Sequences of plasmids and primers used in this study-
pHelper backbone plasmid vectors

| Plasmid name | Sequence | Note |
|---|---|---|
| pCMV_CAST | SEQ ID | N . . . N: CAST protein ORF sequence |
| | NO: 976 | without start and stop codons |
| pCMV_HA- | SEQ ID | N . . . N: CAST protein ORF sequence |
| NLS-CAST | NO: 977 | without start and stop codons |
| pCMV_CAST- | SEQ ID | N . . . N: CAST protein ORF sequence |
| NLS-HA | NO: 978 | without start and stop codons |

TABLE 16B
Sequences of plasmids and primers used in this study-
Human codon optimized CAST proteins

| Identification | | | |
|---|---|---|---|
| name for the | | | Human codon |
| system | Subtype | Protein | optimized ORF sequence |
| AvCAST | I-B1 | Cas5 | SEQ ID NO: 979 |
| | | Cas6 | SEQ ID NO: 980 |
| | | Cas7 | SEQ ID NO: 981 |
| | | Cas8 | SEQ ID NO: 982 |
| | | TniQ | SEQ ID NO: 983 |
| | | TnsA | SEQ ID NO: 984 |
| | | TnsB | SEQ ID NO: 985 |
| | | TnsC | SEQ ID NO: 986 |
| AnCAST | I-B1 | Cas5 | SEQ ID NO: 987 |
| | | Cas6 | SEQ ID NO: 988 |
| | | Cas7 | SEQ ID NO: 989 |
| | | Cas8 | SEQ ID NO: 990 |
| | | TniQ | SEQ ID NO: 991 |
| | | TnsA | SEQ ID NO: 992 |
| | | TnsB | SEQ ID NO: 993 |
| | | TnsC | SEQ ID NO: 994 |
| NosCAST | I-B1 | Cas5 | SEQ ID NO: 995 |
| | | Cas6 | SEQ ID NO: 996 |
| | | Cas7 | SEQ ID NO: 997 |
| | | Cas8 | SEQ ID NO: 998 |
| | | TniQ | SEQ ID NO: 999 |
| | | TnsA | SEQ ID NO: 1000 |
| | | TnsB | SEQ ID NO: 1001 |
| | | TnsC | SEQ ID NO: 1002 |
| PmcCAST | I-B2 | Cas5 | SEQ ID NO: 1003 |
| | | Cas6 | SEQ ID NO: 1004 |
| | | Cas7 | SEQ ID NO: 1005 |
| | | Cas8 | SEQ ID NO: 1006 |
| | | TniQ | SEQ ID NO: 1007 |
| | | TnsAB | SEQ ID NO: 1008 |
| | | TnsC | SEQ ID NO: 1009 |
| NdCAST | I-B2 | Cas5 | SEQ ID NO: 1010 |
| | | Cas6 | SEQ ID NO: 1011 |
| | | Cas7 | SEQ ID NO: 1012 |
| | | Cas8 | SEQ ID NO: 1013 |
| | | TniQ | SEQ ID NO: 1014 |
| | | TnsAB | SEQ ID NO: 1015 |
| | | TnsC | SEQ ID NO: 1016 |
| TolCAST | I-B2 | Cas5 | SEQ ID NO: 1017 |
| | | Cas6 | SEQ ID NO: 1018 |
| | | Cas7 | SEQ ID NO: 1019 |
| | | Cas8 | SEQ ID NO: 1020 |
| | | TniQ | SEQ ID NO: 1021 |
| | | TnsAB | SEQ ID NO: 1022 |
| | | TnsC | SEQ ID NO: 1023 |
| IB5 | I-B1 | Cas5 | SEQ ID NO: 1024 |
| | | Cas6 | SEQ ID NO: 1025 |
| | | Cas7 | SEQ ID NO: 1026 |
| | | Cas8 | SEQ ID NO: 1027 |
| | | TniQ | SEQ ID NO: 1028 |
| | | TnsA | SEQ ID NO: 1029 |
| | | TnsB | SEQ ID NO: 1030 |
| | | TnsC | SEQ ID NO: 1031 |
| IB24 | I-B1 | Cas5 | SEQ ID NO: 1032 |
| | | Cas6 | SEQ ID NO: 1033 |
| | | Cas7 | SEQ ID NO: 1034 |
| | | Cas8 | SEQ ID NO: 1035 |
| | | TniQ | SEQ ID NO: 1036 |
| | | TnsA | SEQ ID NO: 1037 |
| | | TnsB | SEQ ID NO: 1038 |
| | | TnsC | SEQ ID NO: 1039 |
| IB35 | I-B1 | Cas5 | SEQ ID NO: 1040 |
| | | Cas6 | SEQ ID NO: 1041 |
| | | Cas7 | SEQ ID NO: 1042 |
| | | Cas8 | SEQ ID NO: 1043 |
| | | TniQ | SEQ ID NO: 1044 |
| | | TnsA | SEQ ID NO: 1045 |
| | | TnsB | SEQ ID NO: 1046 |
| | | TnsC | SEQ ID NO: 1047 |
| IB39 | I-B1 | Cas5 | SEQ ID NO: 1048 |
| | | Cas6 | SEQ ID NO: 1049 |
| | | Cas7 | SEQ ID NO: 1050 |
| | | Cas8 | SEQ ID NO: 1051 |
| | | TniQ | SEQ ID NO: 1052 |
| | | TnsA | SEQ ID NO: 1053 |
| | | TnsB | SEQ ID NO: 1054 |
| | | TnsC | SEQ ID NO: 1055 |
| IB3 | I-B2 | Cas5 | SEQ ID NO: 1056 |
| | | Cas6 | SEQ ID NO: 1057 |
| | | Cas7 | SEQ ID NO: 1058 |
| | | Cas8 | SEQ ID NO: 1059 |
| | | TniQ | SEQ ID NO: 1060 |
| | | TnsAB | SEQ ID NO: 1061 |
| | | TnsC | SEQ ID NO: 1062 |
| IB4 | I-B2 | Cas5 | SEQ ID NO: 1063 |
| | | Cas6 | SEQ ID NO: 1064 |
| | | Cas7 | SEQ ID NO: 1065 |
| | | Cas8 | SEQ ID NO: 1066 |
| | | TniQ | SEQ ID NO: 1067 |
| | | TnsAB | SEQ ID NO: 1068 |
| | | TnsC | SEQ ID NO: 1069 |
| IB8 | I-B2 | Cas5 | SEQ ID NO: 1070 |
| | | Cas6 | SEQ ID NO: 1071 |
| | | Cas7 | SEQ ID NO: 1072 |
| | | Cas8 | SEQ ID NO: 1073 |
| | | TniQ | SEQ ID NO: 1074 |
| | | TnsAB | SEQ ID NO: 1075 |
| | | TnsC | SEQ ID NO: 1076 |
| IB16 | I-B2 | Cas5 | SEQ ID NO: 1077 |
| | | Cas6 | SEQ ID NO: 1078 |
| | | Cas7 | SEQ ID NO: 1079 |
| | | Cas8 | SEQ ID NO: 1080 |
| | | TniQ | SEQ ID NO: 1081 |
| | | TnsAB | SEQ ID NO: 1082 |
| | | TnsC | SEQ ID NO: 1083 |
| IB21 | I-B2 | Cas5 | SEQ ID NO: 1084 |
| | | Cas6 | SEQ ID NO: 1085 |
| | | Cas7 | SEQ ID NO: 1086 |
| | | Cas8 | SEQ ID NO: 1087 |
| | | TniQ | SEQ ID NO: 1088 |
| | | TnsAB | SEQ ID NO: 1089 |
| | | TnsC | SEQ ID NO: 1090 |
| IB23 | I-B2 | Cas5 | SEQ ID NO: 1091 |
| | | Cas6 | SEQ ID NO: 1092 |
| | | Cas7 | SEQ ID NO: 1093 |
| | | Cas8 | SEQ ID NO: 1094 |
| | | TniQ | SEQ ID NO: 1095 |
| | | TnsA* | SEQ ID NO: 1096 |
| | | TnsB* | SEQ ID NO: 1097 |
| | | TnsC | SEQ ID NO: 1098 |
| IB25 | I-B2 | Cas5 | SEQ ID NO: 1099 |
| | | Cas6 | SEQ ID NO: 1100 |
| | | Cas7 | SEQ ID NO: 1101 |
| | | Cas8 | SEQ ID NO: 1102 |
| | | TniQ | SEQ ID NO: 1103 |
| | | TnsAB | SEQ ID NO: 1104 |
| | | TnsC | SEQ ID NO: 1105 |
| IB27 | I-B2 | Cas5 | SEQ ID NO: 1106 |
| | | Cas6 | SEQ ID NO: 1107 |
| | | Cas7 | SEQ ID NO: 1108 |
| | | Cas8 | SEQ ID NO: 1109 |
| | | TniQ | SEQ ID NO: 1110 |
| | | TnsAB | SEQ ID NO: 1111 |
| | | TnsC | SEQ ID NO: 1112 |
| IB34 | I-B2 | Cas5 | SEQ ID NO: 1113 |
| | | Cas6 | SEQ ID NO: 1114 |
| | | Cas7 | SEQ ID NO: 1115 |
| | | Cas8 | SEQ ID NO: 1116 |
| | | TniQ | SEQ ID NO: 1117 |
| | | TnsAB | SEQ ID NO: 1118 |
| | | TnsC | SEQ ID NO: 1119 |
| IB36 | I-B2 | Cas5 | SEQ ID NO: 1120 |
| | | Cas6 | SEQ ID NO: 1121 |
| | | Cas7 | SEQ ID NO: 1122 |
| | | Cas8 | SEQ ID NO: 1123 |
| | | TniQ | SEQ ID NO: 1124 |
| | | TnsAB | SEQ ID NO: 1125 |
| | | TnsC | SEQ ID NO: 1126 |
| IB40 | I-B2 | Cas5 | SEQ ID NO: 1127 |
| | | Cas6 | SEQ ID NO: 1128 |
| | | Cas7 | SEQ ID NO: 1129 |
| | | Cas8 | SEQ ID NO: 1130 |
| | | TniQ | SEQ ID NO: 1131 |
| | | TnsAB | SEQ ID NO: 1132 |
| | | TnsC | SEQ ID NO: 1133 |
| IB41 | I-B2 | Cas5 | SEQ ID NO: 1134 |
| | | Cas6 | SEQ ID NO: 1135 |
| | | Cas7 | SEQ ID NO: 1136 |
| | | Cas8 | SEQ ID NO: 1137 |
| | | TniQ | SEQ ID NO: 1138 |
| | | TnsAB | SEQ ID NO: 1139 |
| | | TnsC | SEQ ID NO: 1140 |
| IB45 | I-B2 | Cas5 | SEQ ID NO: 1141 |
| | | Cas6 | SEQ ID NO: 1142 |
| | | Cas7 | SEQ ID NO: 1143 |
| | | Cas8 | SEQ ID NO: 1144 |
| | | TniQ | SEQ ID NO: 1145 |
| | | TnsAB | SEQ ID NO: 1146 |
| | | TnsC | SEQ ID NO: 1147 |
| IB46 | I-B2 | Cas5 | SEQ ID NO: 1148 |
| | | Cas6 | SEQ ID NO: 1149 |
| | | Cas7 | SEQ ID NO: 1150 |
| | | Cas8 | SEQ ID NO: 1151 |
| | | TniQ | SEQ ID NO: 1152 |
| | | TnsAB | SEQ ID NO: 1153 |
| | | TnsC | SEQ ID NO: 1154 |
| IB47 | I-B2 | Cas5 | SEQ ID NO: 1155 |
| | | Cas6 | SEQ ID NO: 1156 |
| | | Cas7 | SEQ ID NO: 1157 |
| | | Cas8 | SEQ ID NO: 1158 |
| | | TniQ | SEQ ID NO: 1159 |
| | | TnsAB | SEQ ID NO: 1160 |
| | | TnsC | SEQ ID NO: 1161 |
| IB48 | I-B2 | Cas5 | SEQ ID NO: 1162 |
| | | Cas6 | SEQ ID NO: 1163 |
| | | Cas7 | SEQ ID NO: 1164 |
| | | Cas8 | SEQ ID NO: 1165 |
| | | TniQ | SEQ ID NO: 1166 |
| | | TnsAB | SEQ ID NO: 1167 |
| | | TnsC | SEQ ID NO: 1168 |
| IB49 | I-B2 | Cas5 | SEQ ID NO: 1169 |
| | | Cas6 | SEQ ID NO: 1170 |
| | | Cas7 | SEQ ID NO: 1171 |
| | | Cas8 | SEQ ID NO: 1172 |
| | | TniQ | SEQ ID NO: 1173 |
| | | TnsAB | SEQ ID NO: 1174 |
| | | TnsC | SEQ ID NO: 1175 |
| IB53 | I-B2 | Cas5 | SEQ ID NO: 1176 |
| | | Cas6 | SEQ ID NO: 1177 |
| | | Cas7 | SEQ ID NO: 1178 |
| | | Cas8 | SEQ ID NO: 1179 |
| | | TniQ | SEQ ID NO: 1180 |
| | | TnsAB | SEQ ID NO: 1181 |
| | | TnsC | SEQ ID NO: 1182 |
| IB54 | I-B2 | Cas5 | SEQ ID NO: 1183 |
| | | Cas6 | SEQ ID NO: 1184 |
| | | Cas7 | SEQ ID NO: 1185 |
| | | Cas8 | SEQ ID NO: 1186 |
| | | TniQ | SEQ ID NO: 1187 |
| | | TnsAB | SEQ ID NO: 1188 |
| | | TnsC | SEQ ID NO: 1189 |
| IB55 | I-B2 | Cas5 | SEQ ID NO: 1190 |
| | | Cas6 | SEQ ID NO: 1191 |
| | | Cas7 | SEQ ID NO: 1192 |
| | | Cas8 | SEQ ID NO: 1193 |
| | | TniQ | SEQ ID NO: 1194 |
| | | TnsAB | SEQ ID NO: 1195 |
| | | TnsC | SEQ ID NO: 1196 |

[0919] Various modifications and variations of the described methods, pharmaceutical compositions, and kits of the invention will be apparent to those skilled in the art without departing from the scope and spirit of the invention. Although the invention has been described in connection with specific embodiments, it will be understood that it is capable of further modifications and that the invention as claimed should not be unduly limited to such specific embodiments. Indeed, various modifications of the described modes for carrying out the invention that are obvious to those skilled in the art are intended to be within the scope of the invention. This application is intended to cover any variations, uses, or adaptations of the invention following, in general, the principles of the invention and including such departures from the present disclosure come within known customary practice within the art to which the invention pertains and may be applied to the essential features herein before set forth.

What is claimed is:

1. An engineered system, the system comprising:
a. one or more CRISPR-associated Tn7 or Tn7-like transposase polypeptides or functional fragments thereof;
b. one or more Type I-B Cas proteins; and
c. a guide molecule capable of complexing with the one or more Type I-B Cas protein and directing binding of the guide-Cas protein complex to a target polynucleotide, wherein the system is capable of reproducible insertions.

2. The engineered system of claim 1, wherein reproducible insertions are measured as a frequency of unique insertion reads.

3. The engineered system of claim 2, wherein the frequency of unique insertion reads is greater than about 10%.

4. The engineered system of claim 1, wherein the target polynucleotide is mtDNA.

5. The engineered system of any of the previous claims, wherein the insertion is about 80 to 100 base pairs, more preferably 80 to 95 nucleotides, after PAM of the target polynucleotide.

6. The engineered system of claim 1, wherein the system further comprises one or more epigenetic modifiers, epigenetic readers, DNA damage repair enzymes, or Poly (ADP-ribose) polymerases (PARPs).

7. The engineered system of claim 6, wherein the epigenetic modifier is a histone deacetylase (HDAC), histone acetyltransferase or histone demethylase.

8. The engineered system of any of the previous claims, wherein the Type I-B Cas protein is IB-43.

9. The engineered system of any of the previous claims, wherein the one or more CRISPR-associated Tn7 or Tn7-like transposase polypeptides comprise TnsA, TnsB, TnsC, and/or TniQ.

10. The engineered system of any of the previous claims, wherein the one or more Type I-B Cas proteins comprises Cas5, Cas6, Cas7, Cas 8, Cas11, or a combination thereof.

11. The engineered system of any of the previous claims, wherein the one or more Type I-B Cas proteins comprises a Cas11.

12. The engineered system of any of claim 10 or 11, wherein the Cas11 is selected from the group consisting of SEQ ID NO: 1197, 1198, 1199, 1200, or Table A.

13. The engineered system of any of the previous claims further comprising a ClpX.

14. The engineered system of claim 13, wherein the ClpX is selected from the group consisting of SEQ ID NO: 1201, 1202, 1203, 1204, Table B, or the National Center for Biotechnology Information Sequence Read Archive under GEO accession GSE223174.

15. The engineered system of claim any of the previous claims, wherein each of the one or more Tn7 transposase polypeptides is independently derived from a same or different species.

16. The engineered system of claim any of the previous claims, wherein each of the one or more Type I-B Cas proteins is derived from a same or different species.

17. The engineered system of claim 15 or 16, wherein the species are selected from IB3, IB4, IB7, IB16, IB20, IB21, IB25, IB27, IB32, IB34, IB36, IB42, IB43, IB45, IB46, IB47, IB48, IB49.

18. The engineered system of claim 9, wherein the TnsA and TnsB are comprised in a single protein (TnsAB).

19. The engineered system of any of the previous claims, further comprising a donor polynucleotide.

20. The engineered system of claim 19, wherein the donor polynucleotide comprises a polynucleotide insert, a left element sequence, and a right element sequence.

21. The engineered system of any of the previous claims, further comprising a nuclear localization signal (NLS).

22. The engineered system of claim 21, wherein the NLS is located at the N-terminus and/or the C-terminus.

23. The engineered system of claim 22, wherein the NLS is located at the N-terminus.

24. The engineered system of claim 22 or 23, wherein the NLS is located on the TnsA, TnsB, TnsAB, TnsC, TniQ, Cas5, Cas6, Cas7, Cas8, Cas11, or any combination thereof.

25. The engineered system of claim 24, wherein the NLS is located on the Cas5, Cas6, Cas7, Cas8, Cas11, TniQ, TnsC, and/or TnsX wherein TnsX is TnsAB or TnsA and TnsB.

26. The system of anyone of the preceding claims, wherein a, b, c, or a combination thereof is encoded by a one or more polynucleotides.

27. The system of claim 26, further comprising a donor polynucleotide.

28. The system of claim 27, wherein the donor polynucleotide comprises a polynucleotide insert, a left element sequence, and a right element sequence.

29. The system of any of claims 26 to 28 wherein the one or more polynucleotides are mRNA.

30. The system of any of claims 26 to 29, wherein a polynucleotide comprising the guide molecule comprises of a spacer flanked on both sides by one or more direct repeats.

31. The system of any of claims 26 to 30, further comprising a cargo.

32. A vector comprising the one or more polynucleotides of any one of claims 26 to 29.

33. An engineered cell comprising the system of any one of claims 1-29, or the vector of claim 32.

34. The engineered cell of claim 33, wherein the cell produces and/or secretes an endogenous or non-endogenous biological product or chemical compound.

35. The engineered cell of claim 34, wherein the biological product is a protein or an RNA.

36. A cell line comprising the engineered cell of claim 33 and progeny thereof.

37. A plant, fungi, protist, or animal model comprising the engineered cell of claim 33 and progeny thereof.

38. A composition comprising the engineered cell of claim 33.

39. A method of inserting a donor polynucleotide into a target polynucleotide in a cell, the method comprises introducing to the cell:
a. one or more CRISPR-associated Tn7 or Tn7-like transposase polypeptides or functional fragments thereof;
b. one or more Type I-B Cas proteins; and
c. a guide molecule capable of complexing with the Type I-B Cas protein and directing binding of the guide-Cas protein complex to a target polynucleotide,
wherein the system is capable of reproducible insertions.

40. The method of claim 39, wherein the target polynucleotide is linear, circular, mitochondrial or genomic DNA.

41. The method of claim 39, wherein the donor polynucleotide:
a. introduces one or more mutations to the target polynucleotide;
b. corrects a premature stop codon in the target polynucleotide;
c. disrupts a splicing site;
d. restores a splicing site; or
e a combination thereof.

42. The method of claim 39, wherein the cell is a prokaryotic cell.

43. The method of claim 39, wherein the cell is a eukaryotic cell.

44. The method of claim 39, wherein insertion of the donor polynucleotide into the target polynucleotide in the cell results in:
a cell or population of cells comprising altered expression levels of one or more gene products;
a cell or population of cells that produces and/or secrete an endogenous or non-endogenous biological product or chemical compound.

45. The method of claim 39, the system further comprising one or more epigenetic modifiers, epigenetic readers, DNA damage repair enzymes, or Poly (ADP-ribose) polymerases (PARPs), wherein the method improves access to the target polynucleotide.

The application's sequence listing, which the Patent Office published only in electronic form, follows.

SEQUENCE LISTING (1209 sequences)

SEQ ID NO: 1 - DNA, 143 bp, synthetic construct
  misc_feature 1..143: note = Synthetic
  source 1..143: mol_type = other DNA
ggagtcgggaatgttcctcactaaagtgagagggagcatcccgtgtggaccgacgtgtgtgtgtgtgtgtgtgtgcacattgtcagtgtgttgggggcggggaagagaacattctgagagtgattgtgggatccttccgcata

SEQ ID NO: 2 - DNA, 119 bp, synthetic construct
  misc_feature 1..119: note = Synthetic
  source 1..119: mol_type = other DNA
cattagacagatcaacgagacagaaagtcaacaaggatacccaggaattgaactcagctctgcaccaagcagactgtgactttacccataactttgccgttactggaaccataactttg

SEQ ID NO: 3 - DNA, 124 bp, synthetic construct
  misc_feature 1..124: note = Synthetic
  source 1..124: mol_type = other DNA
cattagacagatcaacgagacagaaagtcaacaaggatacccaggaattgaactcagctctgcaccaagcagacctaattgtgactttacccataactttgccgttactggaaccataactttg

SEQ ID NO: 4 - DNA, 123 bp, synthetic construct
  misc_feature 1..123: note = Synthetic
  source 1..123: mol_type = other DNA
cattagacagatcaacgagacagaaagtcaacaaggatacccaggaattgaactcagctctgcaccaagcagacctattgtgactttacccataactttgccgttactggaaccataactttg

SEQ ID NO: 5 - DNA, 124 bp, synthetic construct; identical to SEQ ID NO: 3
  misc_feature 1..124: note = Synthetic
  source 1..124: mol_type = other DNA

SEQ ID NO: 6 - DNA, 124 bp, synthetic construct; identical to SEQ ID NO: 3
  misc_feature 1..124: note = Synthetic
  source 1..124: mol_type = other DNA

SEQ ID NO: 7 - DNA, 124 bp, synthetic construct
  misc_feature 1..124: note = Synthetic
  source 1..124: mol_type = other DNA
cattagacagatcaacgagacagaaagtcaacaaggatacccaggaattgaactcagctctgcatcaagcggacctaattgtgactttacccataactttgctgttactggaaccataactttg

SEQ ID NO: 8 - DNA, 124 bp, synthetic construct; identical to SEQ ID NO: 3
  misc_feature 1..124: note = Synthetic
  source 1..124: mol_type = other DNA

SEQ ID NO: 9 - DNA, 123 bp, synthetic construct
  misc_feature 1..123: note = Synthetic
  source 1..123: mol_type = other DNA
cattagacagatcaacgagacagaaagttaacaaggatacccaggaattgaactcagctctgcaccaagcggacctaattgtgactttacccataactttgccgttacggaaccataactttg

SEQ ID NO: 10 - DNA, 124 bp, synthetic construct; identical to SEQ ID NO: 3
  misc_feature 1..124: note = Synthetic
  source 1..124: mol_type = other DNA

SEQ ID NO: 11 - DNA, 124 bp, synthetic construct
  misc_feature 1..124: note = Synthetic
  source 1..124: mol_type = other DNA
cattagacagatcaacgagacagaaagtcaacaaggatacccaggaattgaactcagctctgcaccaagtggacctaattgtgactttacccataactttgccgttactggaaccataactttg

SEQ ID NO: 12 - DNA, 124 bp, synthetic construct
  misc_feature 1..124: note = Synthetic
  source 1..124: mol_type = other DNA
cattagacagatcaacgagacagaaagtcaacaaggatacccaggaattaaactcagctctgcaccaagcggacctaattgtgactttacccataactttgccgttactggaaccataactttg

SEQ ID NO: 13 - DNA, 124 bp, synthetic construct
  misc_feature 1..124: note = Synthetic
  source 1..124: mol_type = other DNA
cattagacagatcaatgagacagaaagtcaacaaggatacccaggaattgaactcagctctgcaccaagcagacctaattgtgactttacccataactttgccgttactggaaccataactttg

SEQ ID NO: 14 - DNA, 124 bp, synthetic construct
  misc_feature 1..124: note = Synthetic
  source 1..124: mol_type = other DNA
cattagacagatcaacgagacagaaagtcaacaaggatacccaggaattgaactcagctctgcaccaagcggacctaattgtgactttacccataactttgccgttactggaaccataactttg

SEQ ID NO: 15 - DNA, 124 bp, synthetic construct; identical to SEQ ID NO: 3
  misc_feature 1..124: note = Synthetic
  source 1..124: mol_type = other DNA

SEQ ID NO: 16 - DNA, 124 bp, synthetic construct; identical to SEQ ID NO: 3
  misc_feature 1..124: note = Synthetic
  source 1..124: mol_type = other DNA

SEQ ID NO: 17 - DNA, 124 bp, synthetic construct; identical to SEQ ID NO: 14
  misc_feature 1..124: note = Synthetic
  source 1..124: mol_type = other DNA

SEQ ID NO: 18 - DNA, 124 bp, synthetic construct; identical to SEQ ID NO: 3
  misc_feature 1..124: note = Synthetic
  source 1..124: mol_type = other DNA

SEQ ID NO: 19 - DNA, 124 bp, synthetic construct; identical to SEQ ID NO: 3
  misc_feature 1..124: note = Synthetic
  source 1..124: mol_type = other DNA

SEQ ID NO: 20 - DNA, 57 bp, synthetic construct
  misc_feature 1..57: note = Synthetic
  source 1..57: mol_type = other DNA
ttgccgttgcggcaaagttatgggtaaagtcacactaatagacatctacagaactct

SEQ ID NO: 21 - DNA, 57 bp, synthetic construct
  misc_feature 1..57: note = Synthetic
  variation 55: note = n is a, c, g, or t
  source 1..57: mol_type = other DNA
ttgccgttgcggcaaagttatgggtaaagtcacactaatagacatctacagaacnct

SEQ ID NO: 22 - DNA, 108 bp, synthetic construct
  misc_feature 1..108: note = Synthetic
  source 1..108: mol_type = other DNA
aaacccacgagggcagagtgctgcttgctgctggccaggcccctgtgtgactttacccataactttgccgcaacggcaagcttatgcttccaataaagggtggcaagg

SEQ ID NO: 23 - DNA, 105 bp, synthetic construct
  misc_feature 1..105: note = Synthetic
  source 1..105: mol_type = other DNA
aaacccacgagggcagagtgctgcttgctgctggccaggcccctgtgtgactttacccataactttgccgcaacggcaagcttatgcagatcggaagagcacacg

SEQ ID NO: 24 - DNA, 99 bp, synthetic construct
  misc_feature 1..99: note = Synthetic
  source 1..99: mol_type = other DNA
ttgttgacggcaaagttatggttccagtaacggcaaagttatgggtaaagtcacacgtgggcccaagctggactctggccactccctggccaggctttg

SEQ ID NO: 25 - DNA, 104 bp, synthetic construct
  misc_feature 1..104: note = Synthetic
  source 1..104: mol_type = other DNA
ttccgatctgcaaagttatggttccagtaacggcaaagttatgggtaaagtcacaccctgcgtgggcccaagctggactctggccactccctggccaggctttg

SEQ ID NO: 26 - DNA, 250 bp, synthetic construct
  misc_feature 1..250: note = Synthetic
  source 1..250: mol_type = other DNA
aattcccactcctttcaagacctaggatcccgaaagacaatctcctacagatggaattatactcacccataggagaaattgtataactttattaggcattgtacaactttattatttattgtacaactttattatgtttccacactaaggactagttctgccctcccgtcacccctgtttctggcaccaggaatccccaacatgcactgatgttgtgtttttaacatgtcaatctgtccgttcacatgtg

SEQ ID NO: 27 - DNA, 14 bp, synthetic construct
  misc_feature 1..14: note = Synthetic
  source 1..14: mol_type = other DNA
taggtcttgaaagg

SEQ ID NO: 28 - DNA, 251 bp, synthetic construct
  misc_feature 1..251: note = Synthetic
  source 1..251: mol_type = other DNA
cgagatgagagctcgtgactggagttcagacgtgtgctcttccgatctcagatggaattatactcacccataggagaaattgtataactttattaggcattgtacaactttattatttattgtacaactttattatgtttccacactaaggactagttctgccctcccgtcacccctgtttctggcaccaggaatccccaacatgcactgatgttgtgtttttaacatgtcaatctgtccgttcacatgtg

SEQ ID NO: 29 - DNA, 249 bp, synthetic construct
  misc_feature 1..249: note = Synthetic
  source 1..249: mol_type = other DNA
gagatgagagtcgtgactgagttcagacggtgtgctcttccgatctcagatggaattatactcacccataggagaaattgtataactttattaggcattgtacaactttattatttattgtacaactttattatgtttccacactaaggactagttctgccctcccgtcacccctgtttctggcaccaggaatccccaacatgcactgatgttgtgtttttaacatgtcaatctgtccgttcacatgtg

SEQ ID NO: 30 - DNA, 251 bp, synthetic construct
  misc_feature 1..251: note = Synthetic
  source 1..251: mol_type = other DNA
acgagatgagagctcgtgactggagttcagacgtgtgctcttccgattcagatggaattatactcacccataggagaaattgtataactttattaggcattgtacaactttattatttattgtacaactttattatgtttccacactaaggactagttctgccctcccgtcacccctgtttctggcaccaggaatccccaacatgcactgatgttgtgtttttaacatgtcaatctgtccgttcacatgtg

SEQ ID NO: 31 - DNA, 125 bp, synthetic construct
  misc_feature 1..125: note = Synthetic
  source 1..125: mol_type = other DNA
ctcttccgatctggatgggtggatggcctaattcctttttcttcagaactgtggggaggaaggggaaggggcacaggaatataaggatcaagaaagaaagagctgggtgtgactttacccataac

SEQ ID NO: 32 - DNA, 113 bp, synthetic construct
  misc_feature 1..113: note = Synthetic
  source 1..113: mol_type = other DNA
ggatgggtggatggcctaattcctttttcttcagaactgtggggaggaaggggaaggggcacaggaatataaggatcaagaaagaaagagctgggtgtgactttacccataac

SEQ ID NO: 33 - DNA, 110 bp, synthetic construct
  misc_feature 1..110: note = Synthetic
  source 1..110: mol_type = other DNA
ggatgggtggatggcctaattcctttttcttcagaactgtggtgattcgtggcttgatgccgttaggcgttgctcaattttttaatgttgaatgtgactttacccataac

SEQ ID NO: 34 - DNA, 125 bp, synthetic construct
  misc_feature 1..125: note = Synthetic
  source 1..125: mol_type = other DNA
gttgcggcaaagttatgggtaaagtcacaggtccctgcgggccttgtcctgattggctgggcacgcgtttaatataagtggaggcgtcgcgctggcgggcattcctgaagctgacagcattcgag

SEQ ID NO: 35 - DNA, 123 bp, synthetic construct
  misc_feature 1..123: note = Synthetic
  source 1..123: mol_type = other DNA
gttgcggcaaagttatgggtaaagtcacaggtccctgcgggccttgtcctgattggctgggcacgcgtttaatataagtggaggcgtcgcgctggcgggcattcctgaagctgacagcattcg

SEQ ID NO: 36 - DNA, 123 bp, synthetic construct
  misc_feature 1..123: note = Synthetic
  source 1..123: mol_type = other DNA
gttgccgcaaagttatgggtaaagtcacaggtccctgcgggccttgtcctgattggctgggcacgcgtttaatataagtggaggcgtcgcgctggcgggcattcctgaagctgacagcattcg

SEQ ID NO: 37 - DNA, 123 bp, synthetic construct
  misc_feature 1..123: note = Synthetic
  source 1..123: mol_type = other DNA
gttgccgcaaagttatgggtaaagtcacaggtccctgcgggcctggtcctgattggctgggcacgcgtttaatataagtggaggcgtcgcgctggcgggcattcctgaagctgacagcattcg

SEQ ID NO: 38 - DNA, 62 bp, synthetic construct
  misc_feature 1..62: note = Synthetic
  source 1..62: mol_type = other DNA
tatctacgatacgtagcggccgacgcgctgggctactgtgactttacccataactttgccgc

SEQ ID NO: 39 - DNA, 62 bp, synthetic construct
  misc_feature 1..62: note = Synthetic
  source 1..62: mol_type = other DNA
gagacaggatacgtagcggccgacgcgctgggctactgtgactttacccataactttgccgc

SEQ ID NO: 40 - DNA, 57 bp, synthetic construct
  misc_feature 1..57: note = Synthetic
  source 1..57: mol_type = other DNA
agcggcaagcttatgggtgaagtcgcagctacgtctttaatgggcagcgcccacata

SEQ ID NO: 41 - DNA, 52 bp, synthetic construct
  misc_feature 1..52: note = Synthetic
  source 1..52: mol_type = other DNA
agcggcaagcttatgggtgaagtcgcagtctttaatgggcagcgcccacata

SEQ ID NO: 42 - DNA, 49 bp, synthetic construct
  misc_feature 1..49: note = Synthetic
  source 1..49: mol_type = other DNA
acggcatacgagatactgtatcgtctcgtgggctcggagatgtgtataa

SEQ ID NO: 43 - DNA, 52 bp, synthetic construct
  misc_feature 1..52: note = Synthetic
  source 1..52: mol_type = other DNA
aacgtataggtgctatgatttttgttttttttttttttttcaagcagaagac

SEQ ID NO: 44 - DNA, 51 bp, synthetic construct
  misc_feature 1..51: note = Synthetic
  source 1..51: mol_type = other DNA
gtgggctcggagatgtgtaagagacagtctttaatgggcagcgcccacata

SEQ ID NO: 45 - DNA, 56 bp, synthetic construct
  misc_feature 1..56: note = Synthetic
  source 1..56: mol_type = other DNA
gcggcaagcttatgggtgaagtcgcagctacgtctttaatgggcagcgcccacata

SEQ ID NO: 46 - DNA, 55 bp, synthetic construct
  misc_feature 1..55: note = Synthetic
  source 1..55: mol_type = other DNA
cggcaagcttatgggtgaagtcgcagctacgtctttaatgggcagcgcccacata

SEQ ID NO: 47 - DNA, 48 bp, synthetic construct
  misc_feature 1..48: note = Synthetic
  source 1..48: mol_type = other DNA
agcggcaagctagtcgcagctacgtctttaatgggcagcgcccacata

SEQ ID NO: 48 - DNA, 50 bp, synthetic construct
  misc_feature 1..50: note = Synthetic
  source 1..50: mol_type = other DNA
agcttatgggtgaagtcgcagctacgtctttaatgggcagcgcccacata

SEQ ID NO: 49 - DNA, 49 bp, synthetic construct
  misc_feature 1..49: note = Synthetic
  source 1..49: mol_type = other DNA
gcttatgggtgaagtcgcagctacgtctttaatgggcagcgcccacata

SEQ ID NO: 50 - DNA, 126 bp, synthetic construct
  misc_feature 1..126: note = Synthetic
  variation 97..102: note = n is a, c, g, or t
  source 1..126: mol_type = other DNA
gtgactttacccataactttgccgcaacggcaagcttatggttccaatagagggcggcaaagttatgcttccaattttccatatgtagagaaagaannnnnntaagtctaccctttttaagtttat

SEQ ID NO: 51 - DNA, 126 bp, synthetic construct
  misc_feature 1..126: note = Synthetic
  source 1..126: mol_type = other DNA
gtgactttacccataactttgccgcaacggcaagcttatggttccaatagagggcggcaaagttatgcttccaattttccatatgtagagaaagaagacgtttaagtctaccctttttaagtttat

SEQ ID NO: 52 - DNA, 126 bp, synthetic construct
  misc_feature 1..126: note = Synthetic
  source 1..126: mol_type = other DNA
gtgactttacccataactttgccgcaacggcaagcttatggttccaatagagggctgcaaagttatgcttccaattttccatatgtagagaaagaagctaactaagtctaccctttttaagtttat

SEQ ID NO: 53 - DNA, 126 bp, synthetic construct
  misc_feature 1..126: note = Synthetic
  source 1..126: mol_type = other DNA
gtgactttacccataactttgccgcaacggcaagcttatggttccaatagagggcggcaaagttatgcttccaattttccatatgtagagaaagaatatccgtaagtctaccctttttaagtttat

SEQ ID NO: 54 - DNA, 126 bp, synthetic construct
  misc_feature 1..126: note = Synthetic
  source 1..126: mol_type = other DNA
gtgactttacccataactttgccgcaacggcaagcttatggttccaatagagggcggcaaagttatgcttccaattttccatatgtagagaaagaagctaactaagtctaccctttttaagtttat

SEQ ID NO: 55 - DNA, 126 bp, synthetic construct
  misc_feature 1..126: note = Synthetic
  source 1..126: mol_type = other DNA
gtgactttacccataactttgccgcaacggcaagcttatggttccaatagagggcggcaaagttatgcttccaattttccatatgtagagaaagaactaatttaagtctaccctttttaagtttat

SEQ ID NO: 56 - DNA, 126 bp, synthetic construct
  misc_feature 1..126: note = Synthetic
  source 1..126: mol_type = other DNA
gtgactttacccataactttgccgcaacggcaagcttatggttccaatagagggcggcaaagttatgcttccaattttccatatgtagagaaagaagataactaagtctaccctttttaagtttat

SEQ ID NO: 57 - DNA, 126 bp, synthetic construct
  misc_feature 1..126: note = Synthetic
  source 1..126: mol_type = other DNA
gtgactttacccataactttgccgcaacggcaagcttatggttccaatagagggcggcaaagttatgcttccaattttccatatgtagagaaagaataattgtaagtctaccctttttaagtttat

SEQ ID NO: 58 - DNA, 126 bp, synthetic construct
  misc_feature 1..126: note = Synthetic
  source 1..126: mol_type = other DNA
gtgactttacccataactttgccgcaacggcaagcttatggttccaatagagggcggcaaagttatgcttccaattttccatatgtagagaaagaaagctgttaagtctaccctttttaagtttat

SEQ ID NO: 59 - DNA, 126 bp, synthetic construct
  misc_feature 1..126: note = Synthetic
  source 1..126: mol_type = other DNA
gtgactttacccataactttgccgcaacggcaagcttatggttccaatagagggcggcaaagttatgcttccaattttccatatgtagagaaagaataagtataagtctaccctttttaagtttat

SEQ ID NO: 60 - DNA, 126 bp, synthetic construct
  misc_feature 1..126: note = Synthetic
  source 1..126: mol_type = other DNA
gtgactttacccataactttgccgcaacggcaagcttatggttccaatagagggcggcaaagttatgcttccaattttccatatgtagagaaagaatgatcttaagtctaccctttttaagtttat

SEQ ID NO: 61 - DNA, 126 bp, synthetic construct
  misc_feature 1..126: note = Synthetic
  source 1..126: mol_type = other DNA
gtgactttacccataactttgccgcaacggcaagcttatggttccaatagagggcggcaaagttatgcttccaattttccatatgtagagaaagaatccacttaagtctaccctttttaagtttat

SEQ ID NO: 62 - DNA, 153 bp, synthetic construct
  misc_feature 1..153: note = Synthetic
  source 1..153: mol_type = other DNA
tggatgggtggatggcctaattcctttttcttcagaactgtggggaggaaggggaaggggcacaggaatataaggatcaagaaagaaagagctgggtgtgactttacccataactttgccgcaacggcaagcttatggttccaatagagggcc

SEQ ID NO: 63 - DNA, 152 bp, synthetic construct
  misc_feature 1..152: note = Synthetic
  source 1..152: mol_type = other DNA
ggatgggtggatggcctaattcctttttcttcagaactgtggggaggaaggggaaggggcacaggaatataaggatcaagaaagaaagagctgggtgtgactttacccataactttgccgcaacggcaagcttatggttccaatagagggcc

SEQ ID NO: 64 - DNA, 152 bp, synthetic construct
  misc_feature 1..152: note = Synthetic
  source 1..152: mol_type = other DNA
ggatgggtggatggcctaattcctttttcttcagaactgtggggaggaaggggaaggggcacaggaatataaggatcaagaaagaaagagctgggtgtgactttacccataactttgccgcaacggcaagcttatggttccaatagagagcc

SEQ ID NO: 65 - DNA, 188 bp, synthetic construct
  misc_feature 1..188: note = Synthetic
  source 1..188: mol_type = other DNA
tggatgggtggatggcctaattcctttttcttcagaactgtggggaggaaggggaaggggcacaggaatataaggatcaagaaagaaagagctgggtgtgactttacccataactttgccgcaacggcaagcttatggttccaatagagggcggcaaagttatgcttccaattttccatatgtagaga

SEQ ID NO: 66 - DNA, 187 bp, synthetic construct
  misc_feature 1..187: note = Synthetic
  source 1..187: mol_type = other DNA
ggatgggtggatggcctaattcctttttcttcagaactgtggggaggaaggggaaggggcacaggaatataaggatcaagaaagaaagagctgggtgtgactttacccataactttgccgcaacggcaagcttatggttccaatagagggcggcaaagttatgcttccaattttccatatgtagaga

SEQ ID NO: 67 - DNA, 187 bp, synthetic construct
  misc_feature 1..187: note = Synthetic
  source 1..187: mol_type = other DNA
tgatgggtggatggcctaattcctttttcttcagaactgtggggaggaaggggaaggggcacaggaatataaggatcaagaaagaaagagctgggtgtgactttacccataactttgccgcaacggcaagcttatggttccaatagagggcggcaaagttatgcttccaattttccatatgtagaga

SEQ ID NO: 68 - DNA, 112 bp, synthetic construct
  misc_feature 1..112: note = Synthetic
  source 1..112: mol_type = other DNA
agacctgaacagcggagagtcctcacgaaactgagggtgaacctcgtggtgtgcgacttcacccataagcttgccgctactggaaccataactttgccgtcaacaacactaa

SEQ ID NO: 69 - DNA, 117 bp, synthetic construct
  misc_feature 1..117: note = Synthetic
  source 1..117: mol_type = other DNA
agacctgaacagcggagagtcctcacgaaactgagggtgaacctcgtggtgcccagtgcgacttcacccataagcttgccgctactggaaccataactttgccgtcaacaacactaa

SEQ ID NO: 70 - DNA, 115 bp, synthetic construct
  misc_feature 1..115: note = Synthetic
  source 1..115: mol_type = other DNA
agacctgaacagcggagagtcctcacgaaactgagggtgaacctcgtggtgtgcgacttcacccataagcttgccgctactggaaccataactttgccgtcaacaacactaaaac

SEQ ID NO: 71 - DNA, 120 bp, synthetic construct
  misc_feature 1..120: note = Synthetic
  source 1..120: mol_type = other DNA
agacctgaacagcggagagtcctcacgaaactgagggtgaacctcgtggtgcccagtgcgacttcacccataagcttgccgctactggaaccataactttgccgtcaacaacactaaaac

SEQ ID NO: 72 - protein, 8 aa, synthetic construct
  REGION 1..8: note = Synthetic
GSGSGGSG

SEQ ID NO: 73 - DNA, 122 bp, synthetic construct
  misc_feature 1..122: note = Synthetic
  source 1..122: mol_type = other DNA
tctgttgatttggggtggagagttccatagatgtctgttaggtccacttgttccagagctgagttcaagccctgaatattctttaaaattatttatgtgactttacccataactttgccgca

SEQ ID NO: 74 - DNA, 129 bp, synthetic construct
  misc_feature 1..129: note = Synthetic
  source 1..129: mol_type = other DNA
tgtatattctgttgatttggggtggagagttccatagatgtctgttaggtccacttgttccagagctgagttcaagccctgaatattctttaaaattatttatgtgactttacccataactttgccgca

SEQ ID NO: 75 - DNA, 127 bp, synthetic construct
  misc_feature 1..127: note = Synthetic
  source 1..127: mol_type = other DNA
aagcttgccgttgcggcaaagttatgggtaaagtcacataaataattttggactgcagtggcgtgatctcagctcactgcaacctctgcctcccaggttcaggcgattcttctgtctcagcctcccg

SEQ ID NO: 76 - DNA, 126 bp, synthetic construct
  misc_feature 1..126: note = Synthetic
  source 1..126: mol_type = other DNA
aagcttgccgttgcggcaaagttatgggtaaagtcacataaataattttggagtgcaatggcgcgatttcggctcactgcaacctccacctcccaggttcaagcgattcttctgtctcagcctccc

SEQ ID NO: 77 - DNA, 221 bp, synthetic construct
  misc_feature 1..221: note = Synthetic
  source 1..221: mol_type = other DNA
gtagatcatggagaagtcatttaataaggccactgttaaacgtagatatatctacgcgtagatatatctacgatacgtagcggccgacgcgctgggctactgtgactttacccagtagcggcaagcttatgggtgaagtcgcagtctttaatgggcagcgcccacatacgcagcgatttccaacagcttgaggcggaagctttaatgcggtagtttatcac

SEQ ID NO: 78 - DNA, 226 bp, synthetic construct
  misc_feature 1..226: note = Synthetic
  source 1..226: mol_type = other DNA
gtagatcatggagaagtcatttaataaggccactgttaaacgtagatatatctacgcgtagatatatctacgatacgtagcggccgacgcgctgggctactgtgactttacccagtagcggcaagcttatgggtgaagtcgcagctacctctttaatgggcagcgcccacatacgcagcgatttccaacagcttgaggcggaagctttaatgcggtagtttatcac

SEQ ID NO: 79 - DNA, 168 bp, synthetic construct
  misc_feature 1..168: note = Synthetic
  variation 106..111: note = n is a, c, g, or t
  source 1..168: mol_type = other DNA
gaatgctgtcagcttcaggaatgcccgccagcgcgacgcctccacttatattaaacgcgtgcccagccaatcaggacaaggcccgcagggaccgttgtgacttaannnnnntaatggttccagtagcggcaagcttatgggtgaagtcgcacacctgtctccaagcca

SEQ ID NO: 80 - DNA, 173 bp, synthetic construct
  misc_feature 1..173: note = Synthetic
  source 1..173: mol_type = other DNA
gaatgctgtcagcttcaggaatgcccgccagcgcgacgcctccacttatattaaacgcgtgcccagccaatcaggacaaggcccgcagggaccgttgtgacttaatggtgataatggttccagtagcggcaagcttatgggtgaagtcgcaaccgtcacctgtctccaagcca

SEQ ID NO: 81 - DNA, 173 bp, synthetic construct
  misc_feature 1..173: note = Synthetic
  source 1..173: mol_type = other DNA
gaatgctgtcagcttcaggaatgcccgccagcgcgacgcctccacttatattaaacgcgtgcccagccaatcaggacaaggcccgcagggaccgttgtgacttaaagttgttaatggttccagtagcggcaagcttatgggtgaagtcgcaaccgtcacctgtctccaagcca

SEQ ID NO: 82 - DNA, 173 bp, synthetic construct
  misc_feature 1..173: note = Synthetic
  source 1..173: mol_type = other DNA
gaatgctgtcagcttcaggaatgcccgccagcgcgacgcctccacttatattaaacgcgtgcccagccaatcaggacaaggcccgcagggaccgttgtgacttaacgcctctaatggttccagtagcggcaagcttatgggtgaagtcgcaaccgtcacctgtctccaagcca

SEQ ID NO: 83 - DNA, 173 bp, synthetic construct
  misc_feature 1..173: note = Synthetic
  source 1..173: mol_type = other DNA
gaatgctgtcagcttcaggaatgcccgccagcgcgacgcctccacttatattaaacgcgtgcccagccaatcaggacaaggcccgcagggaccgttgtgacttaagctatataatggttccagtagcggcaagcttatgggtgaagtcgcaaccgtcacctgtctccaagcca

SEQ ID NO: 84 - DNA, 173 bp, synthetic construct
  misc_feature 1..173: note = Synthetic
  source 1..173: mol_type = other DNA
gaatgctgtcagcttcaggaatgcccgccagcgcgacgcctccacttatattaaacgcgtgcccagccaatcaggacaaggcccgcagggaccgttgtgacttaagagaaataatggttccagtagcggcaagcttatgggtgaagtcgcaaccgtcacctgtctccaagcca

SEQ ID NO: 85 - DNA, 173 bp, synthetic construct
  misc_feature 1..173: note = Synthetic
  source 1..173: mol_type = other DNA
gaatgctgtcagcttcaggaatgcccgccagcgcgacgcctccacttatattaaacgcgtgcccagccaatcaggacaaggcccgcagggaccgttgtgacttaagtacgataatggttccagtagcggcaagcttatgggtgaagtcgcaaccgtcacctgtctccaagcca

SEQ ID NO: 86 - DNA, 173 bp, synthetic construct
  misc_feature 1..173: note = Synthetic
  source 1..173: mol_type = other DNA
gaatgctgtcagcttcaggaatgcccgccagcgcgacgcctccacttatattaaacgcgtgcccagccaatcaggacaaggcccgcagggaccgttgtgacttaagagccctaatggttccagtagcggcaagcttatgggtgaagtcgcaaccgtcacctgtctccaagcca

SEQ ID NO: 87 - DNA, 173 bp, synthetic construct
  misc_feature 1..173: note = Synthetic
  source 1..173: mol_type = other DNA
gaatgctgtcagcttcaggaatgcccgccagcgcgacgcctccacttatattaaacgcgtgcccagccaatcaggacaaggcccgcagggaccgttgtgacttaagcagtttaatggttccagtagcggcaagcttatgggtgaagtcgcaaccgtcacctgtctccaagcca

SEQ ID NO: 88 - DNA, 173 bp, synthetic construct; identical to SEQ ID NO: 80
  misc_feature 1..173: note = Synthetic
  source 1..173: mol_type = other DNA

SEQ ID NO: 89 - DNA, 173 bp, synthetic construct
  misc_feature 1..173: note = Synthetic
  source 1..173: mol_type = other DNA
gaatgctgtcagcttcaggaatgcccgccagcgcgacgcctccacttatattaaacgcgtgcccagccaatcaggacaaggcccgcagggaccgttgtgacttaaggatgttaatggttccagtagcggcaagcttatgggtgaagtcgcaaccgtcacctgtctccaagcca

SEQ ID NO: 90 - DNA, 173 bp, synthetic construct; identical to SEQ ID NO: 87
  misc_feature 1..173: note = Synthetic
  source 1..173: mol_type = other DNA

SEQ ID NO: 91 - DNA, 173 bp, synthetic construct
  misc_feature 1..173: note = Synthetic
  source 1..173: mol_type = other DNA
gaatgctgtcagcttcaggaatgcccgccagcgcgacgcctccacttatattaaacgcgtgcccagccaatcaggacaaggcccgcagggaccgttgtgacttaagggcgataatggttccagtagcggcaagcttatgggtgaagtcgcaaccgtcacctgtctccaagcca

SEQ ID NO: 92 - DNA, 173 bp, synthetic construct
  misc_feature 1..173: note = Synthetic
  source 1..173: mol_type = other DNA
gaatgctgtcagcttcaggaatgcccgccagcgcgacgcctccacttatattaaacgcgtgcccagccaatcaggacaaggcccgcagggaccgttgtgacttaaagggattaatggttccagtagcggcaagcttatgggtgaagtcgcaaccgtcacctgtctccaagcca

SEQ ID NO: 93 - DNA, 173 bp, synthetic construct; identical to SEQ ID NO: 82
  misc_feature 1..173: note = Synthetic
  source 1..173: mol_type = other DNA

SEQ ID NO: 94 - DNA, 173 bp, synthetic construct
  misc_feature 1..173: note = Synthetic
  source 1..173: mol_type = other DNA
gaatgctgtcagcttcaggaatgcccgccagcgcgacgcctccacttatattaaacgcgtgcccagccaatcaggacaaggcccgcagggaccgttgtgacttaacgacgttaatggttccagtagcggcaagcttatgggtgaagtcgcaaccgtcacctgtctccaagcca

SEQ ID NO: 95 - protein, 288 aa, synthetic construct
  REGION 1..288: note = Synthetic
MDPIRSRTPSPARELLSGPQPDGVQPTADRGVSPPAGGPLDGLPARRTMSRTRLPSPPAPSPAFSADSFSDLLRQFDPSLFNTSLFDSLPPFGAHHTEAATGEWDEVQSGLRAADAPPPTMRVAVTAARPPRAKPAPRRRAAQPSDASPAAQVDLRTLGYSQQQQEKIKPKVRSTVAQHHEALVGHGFTHAHIVALSQHPAALGTVAVKYQDMIAALPEATHEAIVGVGKQWSGARALEALLTVAGELRGPPLQLDTGQLLKIAKRGGVTAVEAVHAWRNALTGAPLN

SEQ ID NO: 96 - protein, 183 aa, synthetic construct
  REGION 1..183: note = Synthetic
RPALESIVAQLSRPDPALAALTNDHLVALACLGGRPALDAVKKGLPHAPALIKRTNRRIPERTSHRVADHAQVVRVLGFFQCHSHPAQAFDDAMTQFGMSRHGLLQLFRRVGVTELEARSGTLPPASQRWDRILQASGMKRAKPSPTSTQTPDQASLHAFADSLERDLDAPSPMHEGDQTRAS

SEQ ID NO: 97 - protein, 4 aa, synthetic construct
  REGION 1..4: note = Synthetic
GGGS

SEQ ID NO: 98 - protein, 5 aa, synthetic construct
  REGION 1..5: note = Synthetic
GGGGS

SEQ ID NO: 99 - protein, 9 aa, synthetic construct
  REGION 1..9: note = Synthetic
GGSGGSGGS

SEQ ID NO: 100 - protein, 15 aa, synthetic construct
  REGION 1..15: note = Synthetic
GGGGSGGGGSGGGGS

SEQ ID NO: 101 - protein, 20 aa, synthetic construct
  REGION 1..20: note = Synthetic
GGGGSGGGGSGGGGSGGGGS

SEQ ID NO: 102 - protein, 25 aa, synthetic construct
  REGION 1..25: note = Synthetic
GGGGSGGGGSGGGGSGGGGSGGGGS

SEQ ID NO: 103 - protein, 30 aa, synthetic construct
  REGION 1..30: note = Synthetic
GGGGSGGGGSGGGGSGGGGSGGGGSGGGGS

SEQ ID NO: 104 - protein, 35 aa, synthetic construct
  REGION 1..35: note = Synthetic
GGGGSGGGGSGGGGSGGGGSGGGGSGGGGSGGGGS

SEQ ID NO: 105 - protein, 40 aa, synthetic construct
  REGION 1..40: note = Synthetic
GGGGSGGGGSGGGGSGGGGSGGGGSGGGGSGGGGSGGGGS

SEQ ID NO: 106 - protein, 45 aa, synthetic construct
  REGION 1..45: note = Synthetic
GGGGSGGGGSGGGGSGGGGSGGGGSGGGGSGGGGSGGGGSGGGGS

SEQ ID NO: 107 - protein, 50 aa, synthetic construct
  REGION 1..50: note = Synthetic
GGGGSGGGGSGGGGSGGGGSGGGGSGGGGSGGGGSGGGGSGGGGSGGGGS

SEQ ID NO: 108 - protein, 55 aa, synthetic construct
  REGION 1..55: note = Synthetic
GGGGSGGGGSGGGGSGGGGSGGGGSGGGGSGGGGSGGGGSGGGGSGGGGSGGGGS

SEQ ID NO: 109 - protein, 60 aa, synthetic construct
  REGION 1..60: note = Synthetic
GGGGSGGGGSGGGGSGGGGSGGGGSGGGGSGGGGSGGGGSGGGGSGGGGSGGGGSGGGGS

SEQ ID NO: 110 - protein, 65 aa, synthetic construct
  REGION 1..65: note = Synthetic
GGGGSGGGGSGGGGSGGGGSGGGGSGGGGSGGGGSGGGGSGGGGSGGGGSGGGGSGGGGSGGGGS

SEQ ID NO: 111 - protein, 70 aa, synthetic construct
  REGION 1..70: note = Synthetic
GGGGSGGGGSGGGGSGGGGSGGGGSGGGGSGGGGSGGGGSGGGGSGGGGSGGGGSGGGGSGGGGSGGGGS

SEQ ID NO: 112 - protein, 75 aa, synthetic construct
  REGION 1..75: note = Synthetic
GGGGSGGGGSGGGGSGGGGSGGGGSGGGGSGGGGSGGGGSGGGGSGGGGSGGGGSGGGGSGGGGSGGGGSGGGGS

SEQ ID NO: 113 - protein, 10 aa, synthetic construct
  REGION 1..10: note = Synthetic
GGGGSGGGGS

SEQ ID NO: 114 - protein, 32 aa, synthetic construct
  REGION 1..32: note = Synthetic
LEPGEKPYKCPECGKSFSQSGALTRHQRTHTR

SEQ ID NO: 115 - protein, 20 aa, synthetic construct
  REGION 1..20: note = Synthetic
PKKKRKVEASSPKKRKVEAS

SEQ ID NO: 116 - DNA, 27 bp, synthetic construct
  misc_feature 1..27: note = Synthetic
  source 1..27: mol_type = other DNA
ggtggtagtggagggagcggcggttca

SEQ ID NO: 117 - protein, 21 aa, synthetic construct
  REGION 1..21: note = Synthetic
GGSGGSGGSGGSGGSGGSGGS

SEQ ID NO: 118 - DNA, 72 bp, synthetic construct
  misc_feature 1..72: note = Synthetic
  source 1..72: mol_type = other DNA
ggtggaggaggctctggtggaggcggtagcggaggcggagggtcgggtggtagtggagggagcggcggttca

SEQ ID NO: 119 - DNA, 48 bp, synthetic construct
  misc_feature 1..48: note = Synthetic
  source 1..48: mol_type = other DNA
tcgggatctgagacgcctgggacctcggaatcggctacgcccgaaagt

SEQ ID NO: 120 - DNA, 192 bp, synthetic construct
  misc_feature 1..192: note = Synthetic
  source 1..192: mol_type = other DNA
gtggataacaaatttaacaaagaaatgtgggcggcgtgggaagaaattcgtaacctgccgaacctgaacggctggcagatgaccgcgtttattgcgagcctggtggatgatccgagccagagcgcgaacctgctggcggaagcgaaaaaactgaacgatgcgcaggcgccgaaaaccggcggtggttctggt

SEQ ID NO: 121 - DNA, 108 bp, synthetic construct
  misc_feature 1..108: note = Synthetic
  source 1..108: mol_type = other DNA
ggtggttctgccggtggctccggttctggctccagcggtggcagctctggtgcgtccggcacgggtactgcgggtggcactggcagcggttccggtactggctctggc

SEQ ID NO: 122 - protein, 7 aa, Simian virus 40
PKKKRKV

SEQ ID NO: 123 - protein, 15 aa, synthetic construct
  REGION 1..15: note = Synthetic
KRPAATKKAGQAKKK

SEQ ID NO: 124 - protein, 9 aa, Homo sapiens
PAAKRVKLD

SEQ ID NO: 125 - protein, 10 aa, Homo sapiens
RQRRNELKRS

SEQ ID NO: 126 - protein, 38 aa, Homo sapiens
NQSSNFGPMKGGNFGGRSSGPYGGGGQYFAKPRNQGGY

SEQ ID NO: 127 - protein, 42 aa, Homo sapiens
RMRIZFKNKGKDTAELRRRRVEVSVELRKAKKDEQILKRRNV

SEQ ID NO: 128 - protein, 8 aa, Homo sapiens
VSRKRPRP

SEQ ID NO: 129 - protein, 8 aa, Homo sapiens
PPKKARED

SEQ ID NO: 130 - protein, 8 aa, Homo sapiens
PQPKKKPL

SEQ ID NO: 131 - protein, 12 aa, Mus sp.
SALIKKKKKMAP

SEQ ID NO: 132 - protein, 5 aa, Influenza virus
DRLRR

SEQ ID NO: 133 - protein, 7 aa, Influenza virus
PKQKKRK

SEQ ID NO: 134 - protein, 10 aa, Hepatitis D virus
RKLKKKIKKL

SEQ ID NO: 135 - protein, 10 aa, Mus sp.
REKKKFLKRR

SEQ ID NO: 136 - protein, 20 aa, Homo sapiens
KRKGDEVDGVDEVAKKKSKK

SEQ ID NO: 137 - protein, 17 aa, Homo sapiens
RKCLQAGMNLEARKTKK

SEQ ID NO: 138 - protein, 107 aa, synthetic construct
  REGION 1..107: note = Synthetic
IEVMYPPPYLDNEKSNGTIIHVKGKHLCPSPLFPGPSKPFWVLVVVGGVLACYSLLVTVAFIIFWVRSKRSRLLHSDYMNMTPRRPGPTRKHYQPYAPPRDFAAYRS

SEQ ID NO: 139 - protein, 9 aa, synthetic construct
  REGION 1..9: note = Synthetic
IEVMYPPPY

SEQ ID NO: 140 - DNA, 7629 bp, Anabaena variabilis
  variation 109..145: note = n is a, c, g, or t
  source 1..7629: mol_type = other DNA
ggggaattgtgagcggataacaattcccctgtagaaataattttgtttaactttaataaggagatataccatggtgctttaacattagatgtcgttaggcgttgagcannnnnnnnnnnnnnnnnnnnnnnnnnnnnnnnnnnnngtgctttaacattagatgtcgttaggcgttgagcagatccgaattcgagctcggcgcgcctgcaggtcgacaagcttgcggccgcataatgcttaagtcgaacagaaagtaatcgtattgtacacggccgcataatcgaaattaatacgactcactataggggaattgtgagcggataacaattccccatcttagtatattagttaagtataagaaggagatatacatatgattattgatagtaacttagttacgcagcttccctcagaatcatcttcaaagccaagagagcttttaatgtctcagtttccatatatggatttaacttttagccttacgggtgagacattacctttcgaccacggctatgaattattttctgcgatcgcccactttgaacccaaactacatacattagacacgttgggaattcagaccattgcaggtattcccaaggatggtgtaattaatctgacccaaaattctaggcttcgtattcggataccagtaaatcaggtacgtttggtttatccattggcgggtaagtcactgagaattggcaagcatacaattcgtttgggtattcctgacatctgtttgcttcaacctgcggagaaactgcgatcgcgcattgtggtaataagaggctatgaagaacctgaaagttttttagtcgtagcgcagcgtcagctagaacaactgggtatccaagcaattgctagcattcccaccaaagccaatggcaaaccaatacgtaggactatcaaaattaagcgatttacagtcgtgggttttggattagaagttataaatttaagcgatgaagactcactgaggttgcaaatacatggtgtaggaggaaagcaaaagatgggttgtggactcttcatgcctattaaggaaaggcaatagcaattactcgaaagcagatgatgaagagagcagataaccccaaaattcagcttaatctcggcgatcctagtatgactttattgcatcgtgctggggttgcaggactttggatgacgctcaaaaaactggaaaaaatctatccaacacctgctgaacgtattggtaatttaacttggttgctaacccctcactatatcaatcttgattgggaaggacaggatttcacagttttagactggttgctgaagcaatcatttcaaatcagcgatgagggtttaatttccctgacagggttagattctcaaaacatggatattcaaaatcaaataattatccatcaaggtatcacagccacttttacacaacataataaattttttaagtctgcgggtcaacaatctaagcaactaattattgatggtattcaggttagggttgattataagaaagctgcttcctatgctcatcaacattttgctaaacatttatgtgaccagtacggacaattgctaaaagagccaattggtatcaggggatggctctatccaggagcagtagttcgccattatgcttttaaagaacaaacagcatttgaagaaaaagcagaatatgctctagcgttgttgttcgctcctatggcttgtcaatattttgtgctgcgatcgcacaccgaaccatcacatacaaactatgttttggttattcctgaagtaattgatttagaactttatgcacattttttgtggtgtttgggtaacttagattataaacattttcacgtatctagcttaggagatgctggattaaaatttcttaattataaaacaacacaaatgcctacttccaattttttaaaacgatgtcaaataatcttttttagtacaaaagcttggtcagaacagcaaaaaactcgtgcagaaatagcaatcatagaattaaattcttcagttaattatctttataagcttagttgtatttgttttccagaatgtcaaattgttttatataaaaatcaacattatttgcttccaagtttaataaaaggaataatcgccaataatctagcaatgggtcggtcttggtgggctaattggatttcatttattaaaaataaaaaatcatttaaacaatttactgatgagtataaaggaattaataagatgattcaggactcagaatgggatatagaagctcaaaagctatttattcaagcttgtcatgaagcattaagaaaaatatatgccaaaatttatagcagaacaaaagaaggtgaatacgctcaaatagaacgagaaaatacacgcattttatctcagttaaaacgctgcaccaatactgacaatttccgaaaatttattgcagagttttggggaagggcagggcaaatagcaattctggaagaacattggatggaattacttccattgactacagggataggcaattggaaagtggccagggacttaacttttattgcaatggctagctacccaaagaataaaataacagaggtagaggtaaaaccatcacaaatatcggagctaaatactgaataaacttcatattttttgatttgattaagaacaaaatattaattgtttaggtaatggtggaatgtttcatctgtttggtaatattttgactagttatggaaccgccgctaataatcgtggtgaaaatgaaggtaataccactacgttacaaaaattaatttggaaaggtgaagttcactctactgtttcatctgaggcaattcgttgggcattgcgatattattggcaaaatgctggctatcctgtgaatagacgttgggatgaaaatgctcaaccagtacccgatcacatcttgcaagatcctaattttgatgatattcgcttcattgatgatgatgtcttgggatttatgcaagcggaagcagcaaaagttgaagcagcagttgaatccgaagttgaaatccagaactcaactcaagatgaggacaaaaaactttctcaaggtaaggagaaagaaactgcaaaacgtaagcgtaaggaaaaacctaaagggaaaataactactagacgaggtgtattagaagtcactcgtgcagtttcaacaattccttatgctggtgatcttactttcaatgctatgagtggaaagaaaggacgaacatctctttattctacagaagttcatgctactcgatatcaatatggcttcgcattaacacccaatagcctcaaagataaatctcgcattaatgctgtcctcgatagcttaatttctattggagaagtggcaggaaatcacgctcgttttctctatgatttttctcctgatagcatcatattacggtggacacacgatttctcacctcggttactttactgttttgaagaagatgaacttagaaatatatcaacaccggatttagtaaggcgggtagaatctggagatatagaccctaaagaattatggataggaggggcaatttctagcactctggaagatttaggggcaaatgtgtttcccggagtgaagacaacagttgaagcattaaaacaggtgattattgaagatttgcagttgtcgttaaggagttcatgatatgacgacaattgccttaaaagtagaagttcccatagcttgttttcggcagtctcgtgctagggaatatggcgaaacttaccctgtaccaccaccatcgacagtatatggaatgttactatctcttgttggagaagtggatagatacaaacactgcggtgtgaagctggcgatcgcacttctatctgaaccagaaaagtcaactgttattcgcacctttcaccgatttaagacgaagaatatccatgactctaaaaataataaacctgattatcaggagttattaactaatatagaatttatagtttgggtggatgctggagtagataaagctaaaccaaatttagtggaacgtttagcagaggcattgactaacccggcttctattaataggtttggtggattatgtttaggtgaaagtcgggatttagtgaatgatgttacccttttacctaaaaattactatgcagaatcaatgcgatggttaattcgagatgaatatgggttactaactttaccttactgggtagaccatgtaggttcgcggggaacgcgatggctacgttacgagattcagaaatgtccagtctttcaaccacctgaattatcttggacttcagttcaaagtaattagcctaggctgctgccaccgctgagcaataactagcataaccccttggggcctctaaacgggtcttgaggggttttttgctgaaacctcaggcatttgagaagcacacggtcacactgcttccggtagtcaataaaccggtaaaccagcaatagacataagcggctatttaacgaccctgccctgaaccgacgaccgggtcatcgtggccggatcttgcggcccctcggcttgaacgaattgttagacattatttgccgactaccttggtgatctcgcctttcacgtagtggacaaattcttccaactgatctgcgcgcgaggccaagcgatcttcttcttgtccaagataagcctgtctagcttcaagtatgacgggctgatactgggccggcaggcgctccattgcccagtcggcagcgacatccttcggcgcgattttgccggttactgcgctgtaccaaatgcgggacaacgtaagcactacatttcgctcatcgccagcccagtcgggcggcgagttccatagcgttaaggtttcatttagcgcctcaaatagatcctgttcaggaaccggatcaaagagttcctccgccgctggacctaccaaggcaacgctatgttctcttgcttttgtcagcaagatagccagatcaatgtcgatcgtggctggctcgaagatacctgcaagaatgtcattgcgctgccattctccaaattgcagttcgcgcttagctggataacgccacggaatgatgtcgtcgtgcacaacaatggtgacttctacagcgcggagaatctcgctctctccaggggaagccgaagtttccaaaaggtcgttgatcaaagctcgccgcgttgtttcatcaagccttacggtcaccgtaaccagcaaatcaatatcactgtgtggcttcaggccgccatccactgcggagccgtacaaatgtacggccagcaacgtcggttcgagatggcgctcgatgacgccaactacctctgatagttgagtcgatacttcggcgatcaccgcttccctcatactcttcctttttcaatattattgaagcatttatcagggttattgtctcatgagcggatacatatttgaatgtatttagaaaaataaacaaatagctagctcactcggtcgctacgctccgggcgtgagactgcggcgggcgctgcggacacatacaaagttacccacagattccgtggataagcaggggactaacatgtgaggcaaaacagcagggccgcgccggtggcgtttttccataggctccgccctcctgccagagttcacataaacagacgcttttccggtgcatctgtgggagccgtgaggctcaaccatgaatctgacagtacgggcgaaacccgacaggacttaaagatccccaccgtttccggcgggtcgctccctcttgcgctctcctgttccgaccctgccgtttaccggatacctgttccgcctttctcccttacgggaagtgtggcgctttctcatagctcacacactggtatctcggctcggtgtaggtcgttcgctccaagctgggctgtaagcaagaactccccgttcagcccgactgctgcgccttatccggtaactgttcacttgagtccaacccggaaaagcacggtaaaacgccactggcagcagccattggtaactgggagttcgcagaggatttgtttagctaaacacgcggttgctcttgaagtgtgcgccaaagtccggctacactggaaggacagatttggttgctgtgctctgcgaaagccagttaccacggttaagcagttccccaactgacttaaccttcgatcaaaccacctccccaggtggttttttcgtttacagggcaaaagattacgcgcagaaaaaaaggatctcaagaagatcctttgatcttttctactgaaccgctctagatttcagtgcaatttatctcttcaaatgtagcacctgaagtcagccccatacgatataagttgtaattctcatgttagtcatgccccgcgcccaccggaaggagctgactgggttgaaggctctcaagggcatcggtcgagatcccggtgcctaatgagtgagctaacttacattaattgcgttgcgctcactgcccgctttccagtcgggaaacctgtcgtgccagctgcattaatgaatcggccaacgcgcggggagaggcggtttgcgtattgggcgccagggtggtttttcttttcaccagtgagacgggcaacagctgattgcccttcaccgcctggccctgagagagttgcagcaagcggtccacgctggtttgccccagcaggcgaaaatcctgtttgatggtggttaacggcgggatataacatgagctgtcttcggtatcgtcgtatcccactaccgagatgtccgcaccaacgcgcagcccggactcggtaatggcgcgcattgcgcccagcgccatctgatcgttggcaaccagcatcgcagtgggaacgatgccctcattcagcatttgcatggtttgttgaaaaccggacatggcactccagtcgccttcccgttccgctatcggctgaatttgattgcgagtgagatatttatgccagccagccagacgcagacgcgccgagacagaacttaatgggcccgctaacagcgcgatttgctggtgacccaatgcgaccagatgctccacgcccagtcgcgtaccgtcttcatgggagaaaataatactgttgatgggtgtctggtcagagacatcaagaaataacgccggaacattagtgcaggcagcttccacagcaatggcatcctggtcatccagcggatagttaatgatcagcccactgacgcgttgcgcgagaagattgtgcaccgccgctttacaggcttcgacgccgcttcgttctaccatcgacaccaccacgctggcacccagttgatcggcgcgagatttaatcgccgcgacaatttgcgacggcgcgtgcagggccagactggaggtggcaacgccaatcagcaacgactgtttgcccgccagttgttgtgccacgcggttgggaatgtaattcagctccgccatcgccgcttccactttttcccgcgttttcgcagaaacgtggctggcctggttcaccacgcgggaaacggtctgataagagacaccggcatactctgcgacatcgtataacgttactggtttcacattcaccaccctgaattgactctcttccgggcgctatcatgccataccgcgaaaggttttgcgccattcgatggtgtccgggatctcgacgctctcccttatgcgactcctgcattaggaaattaatacgactcactata

SEQ ID NO: 141 - DNA, 3959 bp, Anabaena variabilis
  source 1..3959: mol_type = other DNA
agcttgccattgcaactattggcttaccacatcgccgcccgtcgcggtttggatgtcgatcagcctcggaatttagcaaaatcagtgactgtggaataaataaatgtggaggaataattcggttcaacaatatataattcggttcaacaattaataaaacgattgaacaataacctctaaaggagtacgattgtaccaagtaaaagtgcgatcgcttccagaggttatttttatggttaggggtagaagggaatggcggggatccatggagaaaaaaatcactggatataccaccgttgatatatcccaatggcatcgtaaagaacattttgaggcatttcagtcagttgctcaatgtacctataaccagaccgttcagctggatattacggcctttttaaagaccgtaaagaaaaataagcacaagttttatccggcctttattcacattcttgcccgcctgatgaatgctcatccggagttccgtatggcaatgaaagacggtgagctggtgatatgggatagtgttcacccttgttacaccgttttccatgagcaaactgaaacgttttcatcgctctggagtgaataccacgacgatttccggcagtttctacacatatattcgcaagatgtggcgtgttacggtgaaaacctggcctatttccctaaagggtttattgagaatatgtttttcgtctcagccaatccctgggtgagtttcaccagttttgatttaaacgtggccaatatggacaacttcttcgcccccgttttcactatgggcaaatattatacgcaaggcgacaaggtgctgatgccgctggcgattcaggttcatcatgccgtttgtgatggcttccatgtcggcagaatgcttaatgaattacaacagtactgcgatgagtggcagggcggggcgtaatttttttaaggcagttattggtgcccttctagagtcccgggatatttacgttttgtaatcacgaatagattcttgattgcaagatgaattgcgatcgcatctttgtcgcacagcagaactttctcaaataattttgaacttatggaattactcaaaacctttatcagtaatggattcaaacaattgtttaaccgttttatttgagatttttactaaaaatcaagtttaccatagaggttaagctgaaattgttcaatcgttttattttatcgacaacggcagattaaatattcgaactgtaataattgtttaaccgaattctttgtctacaaatatttgtagagtagataagataatttctagatgtgactactatatcacatctaggtaccgagctcgaattcactggccgtcgttttacaacgtcgtgactgggaaaaccctggcgttacccaacttaatcgccttgcagcacatccccctttcgccagctggcgtaatagcgaagaggcccgcaccgatcgcccttcccaacagttgcgcagcctgaatggcgaatggcgcctgatgcggtattttctccttacgcatctgtgcggtatttcacaccgcatatggtgcactctcagtacaatctgctctgatgccgcatagttaagccagccccgacacccgccaacacccgctgacgcgccctgacgggcttgtctgctcccggcatccgcttacagacaagctgtgaccgtctccgggagctgcatgtgtcagaggttttcaccgtcatcaccgaaacgcgcgagacgaaagggcctcgtgatacgcctatttttataggttaatgtcatgataataatggtttcttagacgtcaggtggcacttttcggggaaatgtgcgcggaacccctatttgtttatttttctaaatacattcaaatatgtatccgctcatgagacaataaccctgataaatgcttcaataatattgaaaaaggaagagtatgagtattcaacatttccgtgtcgcccttattcccttttttgcggcattttgccttcctgtttttgctcacccagaaacgctggtgaaagtaaaagatgctgaagatcagttgggtgcacgagtgggttacatcgaactggatctcaacagcggtaagatccttgagagttttcgccccgaagaacgttttccaatgatgagcacttttaaagttctgctatgtggcgcggtattatcccgtattgacgccgggcaagagcaactcggtcgccgcatacactattctcagaatgacttggttgagtactcaccagtcacagaaaagcatcttacggatggcatgacagtaagagaattatgcagtgctgccataaccatgagtgataacactgcggccaacttacttctgacaacgatcggaggaccgaaggagctaaccgcttttttgcacaacatgggggatcatgtaactcgccttgatcgttgggaaccggagctgaatgaagccataccaaacgacgagcgtgacaccacgatgcctgtagcaatggcaacaacgttgcgcaaactattaactggcgaactacttactctagcttcccggcaacaattaatagactggatggaggcggataaagttgcaggaccacttctgcgctcggcccttccggctggctggtttattgctgataaatctggagccggtgagcgtgggtctcgcggtatcattgcagcactggggccagatggtaagccctcccgtatcgtagttatctacacgacggggagtcaggcaactatggatgaacgaaatagacagatcgctgagataggtgcctcactgattaagcattggtaactgtcagaccaagtttactcatatatactttagattgatttaaaacttcatttttaatttaaaaggatctaggtgaagatcctttttgataatctcatgaccaaaatcccttaacgtgagttttcgttccactgagcgtcagaccccgtagaaaagatcaaaggatcttcttgagatcctttttttctgcgcgtaatctgctgcttgcaaacaaaaaaaccaccgctaccagcggtggtttgtttgccggatcaagagctaccaactctttttccgaaggtaactggcttcagcagagcgcagataccaaatactgttcttctagtgtagccgtagttaggccaccacttcaagaactctgtagcaccgcctacatacctcgctctgctaatcctgttaccagtggctgctgccagtggcgataagtcgtgtcttaccgggttggactcaagacgatagttaccggataaggcgcagcggtcgggctgaacggggggttcgtgcacacagcccagcttggagcgaacgacctacaccgaactgagatacctacagcgtgagctatgagaaagcgccacgcttcccgaagggagaaaggcggacaggtatccggtaagcggcagggtcggaacaggagagcgcacgagggagcttccagggggaaacgcctggtatctttatagtcctgtcgggtttcgccacctctgacttgagcgtcgatttttgtgatgctcgtcaggggggcggagcctatggaaaaacgccagcaacgcggcctttttacggttcctggccttttgctggccttttgctcacatgttctttcctgcgttatcccctgattctgtggataaccgtattaccgcctttgagtgagctgataccgctcgccgcagccgaacgaccgagcgcagcgagtcagtgagcgaggaagcggaagagcgcccaatacgcaaaccgcctctccccgcgcgttggccgattcattaatgcagctggcacgacaggtttcccgactggaaagcgggcagtgagcgcaacgcaattaatgtgagttagctcactcattaggcaccccaggctttacactttatgcttccggctcgtatgttgtgtggaattgtgagcggataacaatttcacacaggaaacagctatgaccatgattacgcca

SEQ ID NO: 142 - DNA, 11096 bp, Anabaena variabilis
  source 1..11096: mol_type = other DNA
ggggaattgtgagcggataacaattcccctgtagaaataattttgtttaactttaataaggagatataccatggttaggggtagaagggaatggactcaagctaaatatgagcgatatataaaagaaggtcgtggccgaggaagtggtaagcactataaaccttggcttacaatccaagatgttccctctaaaggacgttcttctagaactcctggttggaaaacaaatcgagtacatcatttcttctcagaccatgaaaaacggctattttatttgtttgagtggtcagatatagtcacagatataagagagcaatttcctttagacaatctcgatctagccatgagtattgctacagacataggtataaagtaccctgtagatacacaaagtggcactcctcacgttttaacaagcgactttatgcttacagtcaaccgcgatgggaagcagatgcagattgcccggactgttaagccgtcaacagaactggagaaaaagcaagttaatgagaaattcgagatagaaagacaatattacttagcaaagggtattgactggggaattatcacagaaaaagaaattcccaggcttttagctgaaaatgttgagtgggttcattctgcttataggctagaagcaaattctgaaatggacactgcacaactgagtgaattgtcaacaattttaaaatctaagcttcaggaagaagatacaactataaatagagtaactactgctttagacaaagaaatgaatataaattccggtacatcactttatgtatttaaacatttaattgctaggaaagaaatccttgtggatctagtagcaataaaattatctgcttgtccgtcaactaaagttattgaaaaaataatattttagacccacatgataggtaaataatatggttaaagatttatttgtcaatgatttaatagagtggattgtataccaaaacactcatatagtcgaaagaattatttggatagatgaaggttacattattgcatttgttatagatattaatgctaagaaaggtctacctgaaccaaggaaaatatcagatattttagaagctataactgaaggtattgcttttaagcagcaacaagatccttgggcaagaattattcgggatgaaaatttgacagataaggaaaaggaatacagagataaagcttgggagataatttcatcattaattatagaagaaccatcaatatattatagaaattttagaggatcgatggttaaagaagcggttgaaaagtacaacgaagaaagggataaagataaattagtagaaaaaaccgtctatggttatttgagaagattttggcagagaggaaaaactataaatgctctcatacctgattttatcaattcatcaggtaagggcaagattcgaggacaatcgggcaagaagagaggaagaccaagaaaatatgcacatgacccagatattggtgaaggtgtaaatgttacagaagaagatagaaagatttttagagtatctataagcaaattttacaataatccaaaagaaaactacttaacaacagcctatgaattaatggtgaaagaatattacaaggaaggaattagatatgacgagaatggtgttcaaaaatctatattaaccccaactgataaaatacctacaattactcaattcaaatactggtatcaacttgaacaggatgatgttaccaaaactttaacatctcgaaaaggagccaagcgagtagctttagagaatagagcaattttgggaaactctaagatggaaactattggccctggttctagatatcaaattgatgccacagttgctgatgtatatttagtttcaaaatataaccgtgactggataattggtagaccagttatctatgtaattattgatgtttttagtagaatgattacaggtgtttatgtcggtttagaaggcccatcttggataggagcaatgatggcactagccaatgtagctacagataaaaccctgttttgccaggaatataacattaatattactgaaaatgaatggccttgcaatcaaatgccagatgcaattttaggagataggggagaattagcaggtatgacagtagaaacattaatccctaatctttatgttcgtattgaaaatgcagcttcctatagagcagattggaaagggttagtagaaagacactttcgtataattcatgaatatgtaaaaccttttttacctggttatgtggatacggattttaggcaaagaggtgcaagggattataggcttgatggcaaacttgatatagatcaatttactgagattattattcgtttaattgttcaccataacaataaacctcttactgaatatgaaagagatgaagcaatgattgctgatgatacccctcctatacctagagagttgtggaagtggggtatcgccaatcgttctggcagactcagaactttttctgaagatattgtcaaattgaacttgatgcctactgagaaagcaactattactgctaaaggcatcaaaatgagaggtaaggagatgtactatacctgtgatagtgctaaaaatgagcaatggtttgaaaaagctagaagtaatctcctttctaagtcagaaaaatcattgattgtatcttatgacatcagaaagccaaacttcatttatcttccatctagtgatggtagagattttgaaaaatgttttcttattgacttagaagggcggtatgctaataaaaactttcatgatattgaatatctgcttgcttatgaagaattgcaaagacagaaaagccaaggtaaacagctacaagaaaaggtagatttaatagctgatattgaaagcatagtagatagagcagaaaaaatgactgatgcttctcaatatcataatttaagtaagagcaagaaagtttctggaataagagataatagggcttttgaaaaggctaaacgacgagagaatgaaggatttgaattagcaattacagataatcagagcagttttcaggttgcagagagtacagcagaaacctccgaacagccagaatcactacagccaaaccatctgaatcttcttaagaaaaagcgacaggagcgaaaacgtggacagaattgagagtgaactggttaaaattcctaatggagaactagcagttattgccagatatatagatcaaaaactgccagaatacaacactaatccattaattcaggcattacctcctatcctatcagcagcagaatttatagataaagtagccagagaaccaaattttgatgaacaagagagagagctagaaccacattatagatttcattgtattgagaggttatctagatattttgaccctcaaaataaaactcttgaattacaaaaagttatttgtacgcttatcatgacaggctatctgtcaaggaaccttttaaaacctgaatatgcaaatcgctctaggcaaatttataatgcaataggtaatggaggaggtaaaaatttagaaaactatgttaatcttcctacatctgcgtccggcttaactctaattggcccatcaggtattggaaagactacaaatttcaaaaatattcttgagctttatccccaaataatttttcatcctgattatagtgtttaccaaatagtttggctgcgggtagattgccctaaaactttaaaggggttatgtatagatacttttgcaggtatcgataaattgttaggaactaatttattaaagaaatttaacccagcacgcacatctgaagattatctattggctcaacttgcacaaacagcacacactcatcatctaggagttttggtgattgatgaaatacaaaatttagcaactgcaaaaagaaatagagacgaaatattaaattttttagtaaagctcgataatactattggaattccagttattcgtgtaggtacgaatgaagccattagttttcttcaaggtaatcttagaaatgctagaagaaatactggagaaggaagtagaatgtgggatagaatggtaaataatgatgaatggtgttactttttagaaggaatatgggaataccaatggacaaaaacacctgttcatttctcggatgaaataaaagaagttttttatgatgaaagccagggaattattgatattgctataaaactttacaaaatggttcaatggagagcgatttcaataggtgaccaagaaattattacggttgatctgattcgtcaagtagctaaagaaggattgtatttagtaaagccaatgctagatgcaattaggttaggggacagagagtggatgattaaatataaggatattgctcctctcgatattacggaatatcacaatagatgtgtatctgagattgatgctaaagatttgacagagattaagagattagctaaaaagcagcagaatcagcagaaagtatctccgaagctcaattatgtaattagtgagctgttgaaattggaagtagaatctggtaaagcaaaggaatgtgcagaacaaattgtttatagtcatgaagatccagacattccaattccatctttagttaataaggcatatgctcttgctttgcaaggatgtcaagtaaatgagagtcttgctaaaacaagtaccaggaaagctaaattaaagacaaagtaccaagagaatgatattcggcgaattgtcgagaatgccaagaaagacaaaaaatctgcatacgaggatttgaaattagcaggtataatcaaaaatccagttgaagattttatcaatatttagcttctaaatgcttagttttttcccaactctgtatcccgatgaacttttatatagcactttagctagataccatattcggagtggaaataaaagtttcaagcaaactgacttagagctattcggttacagttcccaacaaatatgcaaaattaccttaactaataatttaaattatttagtgaaaaacttacctttacgctcccagcaaaaagttgagaatttactacaaaatcatactttatattccttttatgcaactttattaatgccgcaggaggcttggctgctgaaaaactcaatgagtaataaattcagtgggtctatactagattttgctaaagtggctaataattctagtgatgattcaaaaaaatttttaaaattttgccctgaatgtttagagaaagatacccaaaagtatggtgaaccttactggcatagaatacatcaagtccctggcattttagtttgtccaattcatcgtgttgttttacacaatagctgtatagaagttgaatcgaaaggcatacattatcatgctgccagcatagataattgtttattagcaaataatgtgaaaaaattgacaaataaaactgtagaaacactttcaatactggcacatgatattaattggctaattcatagcagttttgcctttcaaggtttggcttggcttcgcgctcagtaccagcgttacttattggataaaggactgctaaaaacctttgctggtggcaagtttaagtttaatgattgtggttttgcccagcttatatttgagttttatggtcaagaatccttagaagccctcaatccaaagctgacccaaaatcaaggtaaatatttttctcactgcttgtttggatgcgacttaaacccagcaattgaccgcataactcatatcttaatgataaaatttttagcaaattctatagaagagttctttcagtcataacttaagtcgaacagaaagtaatcgtattgtacacggccgcataatcgaaattaatacgactcactataggggaattgtgagcggataacaattccccatcttagtatattagttaagtataagaaggagatatacatggtgagttttttccctcaaccttatccagatgaaattttatatagtgttattgctcgttatcacattagaagtggcaatacgagtccaaaaattacattacaagatttatttaagtcacagactactgtggcgacagtagatttaccatcgaaccttagtaatttaattaaaaacctacaatttatctcaaattaccaagttgaagagttgatatataaacatactctctaccctttatatagcccttttttgccagcaaacaggtctagtcaggtactggaatctatgaaaggagattatgggggagatattcatacaagagccggaattatggcaagctcaattactatgccgaaatatttgcggttttgtccaacttgctgggaagaagacttaaaaaattatggcgaaccttactggcatcgcatccatcaaataccagggattttagtttgtccatttcatggtgaagttttgcaagatagcctagctcctttacatggttttaataagcatgaatattatgcagctagtacagacaactgttctattactaaagaacccagtattcttagccctgacacactgaaaaaattactaatattagccaaagatttttggtggttactcaatagtgaaataccttgccaagagccacagtggtttcgcaaacagtacacaaatctgatgattgagcagggttttgcaactccaactggtcgaatttaccagaacaaactactagataattttttgttcttttatggtcaagaaatgctcagtgctgttgattcaatggtaaatcataatgattcaaacaactgggttactagcatcgtcaggaaatataggaaatctttccatcctcttagacatctgctaatgatgcgttttttgaaaacatcagtagaggaattttttcaaaaagatactgaatacaagccttttggcgaacccccctggttgtgtctcaatgctgccgcagaacattatctacaaccagtgattaccaatttagtcattactttatgctgcgatacaaaaaagcctgtcggtactttttcttgtgcttgcggaatggtttattgccggactgggcctgatgaaacggatgaagacaaagttcgcattggtaaagtcaaggcattcggtcaaatatgggagcaaaagctgaaagaattggtggaagttgaaaagttgggtttgcgggagacagccagaagattaaatgttgatgccagaactatcaaacgttatgtatctcgtctaaaattgacaacttattggcagactagaacagaaaatgactctgtaggcttacagggagtcccagaaatagatcccaattttgcaactgaactcaaattaaaacacaggcaaaattggatggctttacaagtacagaaccctgaagcttcaaagacaactctgagaaaactagtaccagccacctatatttggctatacaggaatgacagagaatggctcaatcaaaactcacccactttacaagttgccgttccttccgttgtgagagttgattggcatgagcgagatcagcaaattctcgctcaggttcaagatgcagtgcgatcgctacttaaggctgatataccagagaaaatttctattagtagggtagggaaaactatcggcttacttgcattactcgaaaaacatctcgaccagatgcctttaacaaaggcttatttggaatcagtcgttgaaactgtagaagaatttcagatgcgccggatcaagtgggcaatcaagctgcttgatgaatgtggagaagaaattatgcgctggaaggtagtcagagttgctgctttgcgagaggattgctcccaaagagtcagtgcatttctggaaagtgaactggagaaagcatacaagaaagagaggtgattaattaacctaggctgctgccaccgctgagcaataactagcataaccccttggggcctctaaacgggtcttgaggggttttttgctgaaacctcaggcatttgagaagcacacggtcacactgcttccggtagtcaataaaccggtaaaccagcaatagacataagcggctatttaacgaccctgccctgaaccgacgacaagctgacgaccgggtctccgcaagtggcacttttcggggaaatgtgcgcggaacccctatttgtttatttttctaaatacattcaaatatgtatccgctcatgaattaattcttagaaaaactcatcgagcatcaaatgaaactgcaatttattcatatcaggattatcaataccatatttttgaaaaagccgtttctgtaatgaaggagaaaactcaccgaggcagttccataggatggcaagatcctggtatcggtctgcgattccgactcgtccaacatcaatacaacctattaatttcccctcgtcaaaaataaggttatcaagtgagaaatcaccatgagtgacgactgaatccggtgagaatggcaaaagtttatgcatttctttccagacttgttcaacaggccagccattacgctcgtcatcaaaatcactcgcatcaaccaaaccgttattcattcgtgattgcgcctgagcgagacgaaatacgcggtcgctgttaaaaggacaattacaaacaggaatcgaatgcaaccggcgcaggaacactgccagcgcatcaacaatattttcacctgaatcaggatattcttctaatacctggaatgctgttttcccggggatcgcagtggtgagtaaccatgcatcatcaggagtacggataaaatgcttgatggtcggaagaggcataaattccgtcagccagtttagtctgaccatctcatctgtaacatcattggcaacgctacctttgccatgtttcagaaacaactctggcgcatcgggcttcccatacaatcgatagattgtcgcacctgattgcccgacattatcgcgagcccatttatacccatataaatcagcatccatgttggaatttaatcgcggcctagagcaagacgtttcccgttgaatatggctcatactcttcctttttcaatattattgaagcatttatcagggttattgtctcatgagcggatacatatttgaatgtatttagaaaaataaacaaataggcatgctagcgcagaaacgtcctagaagatgccaggaggatacttagcagagagacaataaggccggagcgaagccgtttttccataggctccgcccccctgacgaacatcacgaaatctgacgctcaaatcagtggtggcgaaacccgacaggactataaagataccaggcgtttccccctgatggctccctcttgcgctctcctgttcccgtcctgcggcgtccgtgttgtggtggaggctttacccaaatcaccacgtcccgttccgtgtagacagttcgctccaagctgggctgtgtgcaagaaccccccgttcagcccgactgctgcgccttatccggtaactatcatcttgagtccaacccggaaagacacgacaaaacgccactggcagcagccattggtaactgagaattagtggatttagatatcgagagtcttgaagtggtggcctaacagaggctacactgaaaggacagtatttggtatctgcgctccactaaagccagttaccaggttaagcagttccccaactgacttaaccttcgatcaaaccgcctccccaggcggttttttcgtttacagagcaggagattacgacgatcgtaaaaggatctcaagaagatcctttacggattcccgacaccatcactctagatttcagtgcaatttatctcttcaaatgtagcacctgaagtcagccccatacgatataagttgtaattctcatgttagtcatgccccgcgcccaccggaaggagctgactgggttgaaggctctcaagggcatcggtcgagatcccggtgcctaatgagtgagctaacttacattaattgcgttgcgctcactgcccgctttccagtcgggaaacctgtcgtgccagctgcattaatgaatcggccaacgcgcggggagaggcggtttgcgtattgggcgccagggtggtttttcttttcaccagtgagacgggcaacagctgattgcccttcaccgcctggccctgagagagttgcagcaagcggtccacgctggtttgccccagcaggcgaaaatcctgtttgatggtggttaacggcgggatataacatgagctgtcttcggtatcgtcgtatcccactaccgagatgtccgcaccaacgcgcagcccggactcggtaatggcgcgcattgcgcccagcgccatctgatcgttggcaaccagcatcgcagtgggaacgatgccctcattcagcatttgcatggtttgttgaaaaccggacatggcactccagtcgccttcccgttccgctatcggctgaatttgattgcgagtgagatatttatgccagccagccagacgcagacgcgccgagacagaacttaatgggcccgctaacagcgcgatttgctggtgacccaatgcgaccagatgctccacgcccagtcgcgtaccgtcttcatgggagaaaataatactgttgatgggtgtctggtcagagacatcaagaaataacgccggaacattagtgcaggcagcttccacagcaatggcatcctggtcatccagcggatagttaatgatcagcccactgacgcgttgcgcgagaagattgtgcaccgccgctttacaggcttcgacgccgcttcgttctaccatcgacaccaccacgctggcacccagttgatcggcgcgagatttaatcgccgcgacaatttgcgacggcgcgtgcagggccagactggaggtggcaacgccaatcagcaacgactgtttgcccgccagttgttgtgccacgcggttgggaatgtaattcagctccgccatcgccgcttccactttttcccgcgttttcgcagaaacgtggctggcctggttcaccacgcgggaaacggtctgataagagacaccggcatactctgcgacatcgtataacgttactggtttcacattcaccaccctgaattgactctcttccgggcgctatcatgccataccgcgaaaggttttgcgccattcgatggtgtccgggatctcgacgctctcccttatgcgactcctgcattaggaaattaatacgactcactata

SEQ ID NO: 143 - DNA, 300 bp, synthetic construct
  misc_feature 1..300: note = Synthetic
  source 1..300: mol_type = other DNA
ccgggatatttacgttttgtaatcacgaatagattcttgattgcaagatgaattgcgatcgcatctttgtcgcacagcagaactttctcaaataattttgaacttatggaattactcaaaacctttatcagtaatggattcaaacaattgtttaaccgttttatttgagatttttactaaaaatcaagtttaccatagaggttaagctgaaattgttcaatcgttttattttatcgacaacggcagattaaatattcgaactgtaataattgtttaaccgaattctttgtctacaaatat

SEQ ID NO: 144 - DNA, 152 bp, synthetic construct
  misc_feature 1..152: note = Synthetic
  source 1..152: mol_type = other DNA
tgtggaggaataattcggttcaacaatatataattcggttcaacaattaataaaacgattgaacaataacctctaaaggagtacgattgtaccaagtaaaagtgcgatcgcttccagaggttatttttatggttaggggtagaagggaatgg

SEQ ID NO: 145 - DNA, 40895 bp, Anabaena sp.
  source 1..40895: mol_type = other DNA
ggttttgaattcaagtaacgcttcatatatgtttacaaatcggctaaatctctgattgggtgatgaggagaaatacgaggcggaaatgtggctattttataggaacagagagagattgccgaaaagtgaattttgagaagtgcctattaaattgtttaaagttatgtagccttttacttacgccgtataagccactgcggtaaactatgcgttgattatgattctttcacagataaagaacactggaaaggagccgttttttcaatgtctcataccgtaaaaatctacgatacctgcattggctgcacccaatgtgtccgcgcttgcccgactgacgttctggagatggttccttgggatggctgcaaagctgctcaagttgcttcttccccccgtacagaagactgtgtaggctgcaaacgttgtgaaactgcttgccccaccgactttttgagcatccgggtttacctgggcgcagaaacgactcgcagtatgggtctagcttactaaggaattaactgctaattcctgatttagttgaccattcagtgcctcgatagcaaacaactttagcattgtagggtgggcggcgatcgctcatcctacaatgtcaaactggaaaaatatgaatatacttcttgacacaggggctaacagctcctttttttgtggaactcgatatttagatcagcatctatacttgatgtaattatcctgaacaggtggtgtgagtaatgtgtggcatcgttgggtatataggcactcaaacagcgacagaaattttattagcagggttagaaaaactagagtatcggggatatgactccgccggaattgccacggtttgggaaggagaggttaattgtgtccgcgctaaagggaaactctacaatcttcgttctaagctggaacagtcagcaacaccagcccaaataggcatcggacacacacgctgggcaactcatggtaaaccagaggaacataacgcccatccgcatttagacacagctatgcgggttgctgttgttcaaaatggaattattgaaaactaccgcgagttacgcgaggaactgaaacagaaggggcatcagttccgttcgcaaaccgatacagaagtgattccccatctaattgcagaatatttacagcatcttccctcaccttctcaccccctcaccccctctgactttttagaggcagtgcgccaagctgccaatcatttagaaggggcatttgcgatcgccgtcatttcggctgactaccccgacgagttggttgtggtgcgtcagcaagcccccttagtgataggatttggtcaaggtgagtttttctgtgcttctgataccccggcaattgtcgcctatacccgcgccgtactccccctagagaatggcgaaatagcccgcctcacacctttgggagtggaaatttacaactttgctggcgacaggttgaaaagacaaccccgaatgctcaacttgaatcccacgatggtagaaaagcagggattcaaacacttcatgctcaaagaaatttatgagcaaccgggagtagtcagagctagtttagaagcatattttgatcatgataccgttaacctagacttaccacaggatttttacgcagatttagagcaaattcacatcgtcgcctgtggtacaagttggcacgctgccttagtgggtaaacacttactcgaacaactagcgggaatttctacccaggtacattacgcttctgagtatcgctatgccccatcacccctgacagccaataccttaattattggtgtcactcagtcaggggaaacggctgataccctagcggcgttagcaatggaaaaagaacgccgccaaggaaaagaagcgaaatatcaggcgcgacttttggggattaccaaccgcccagaaagtagcctcggtttgatggttccccatattattaataccctagccggaattgagattggggtagcggcgacaaaaacctttattgcccagttgatggcgttttatgccttagcattggatttagcggctcgtcgccagacactaccaccggaaaaactcacagaaattattcaaggcttgcgccagattcccaaggaaattgaggcgacattagaacgtcaggaagaaatcaccgaacacttagcccatgaatttgcggaaaccaaagattttatctttttgggtagagggattaacttcccgatagcattagaaggggcgttgaaattaaaagaaatcagttatattcacgctgaaggttatccggctggggaaatgaaacacggcccgatagctttgttagatgctaaagttccggtagtagcgatcgcagttcctggtactgtgtatgaaaaggtgatttctaacgctcaagaagccaaagccagagattcccggttaattggggtgactcctgtgacagatggcgaagccgcagaaatctttaacgatttactcccagtgtcatcagtggatgaattattatctcccatcctgacagtcgtacctttgcaacttttggcttatcatattgcagcaagaaggggtttagacgttgaccagcctcggaatttggcgaagtcggtaactgtggagtaaaataatactttaaataagtataattgtacaacaataaaaaagtcgtataacaaataaaaaagttgtacaatatataaaaaagttgtacaatatatcctgtgggtgcatatgcaagcatctacaggagtttttatggctagaagtaagcaagattggacgcaagccaagtttgagcgttactgtaaggaaggtcgtggtcagggcagtgggaaaaactatcagccctggatcaagattcaggactttccctccaagggtcgtgtttccagaccaccaggttggaaaacaaaccgagaacatcatctcttttctgataacgagaagcgactgttttacgtatttgagtggtcagatgcgatcgttgatattagagagcagtttcctctacttgatctggacttagcaattaatattgcggatgaaatgggtattaactatcccaaagatccgcaaagcaatacgccatatgttttagccacggattttatgctttctgtccagcaaggtaagaatatagttcagaaagcacgaacatttaaactaaccaaggatttgggaagtaagtcggtagctgaaaaatttgagttagaaaaacgttactttgctgccaaaggtattgattggggaataatcacagaaaaagaagtccctaaacaattagctgagaatgttgaatggattcatactgcttataaattagaagaaaatgcagatataaatcttgaagaattacgtaacatcgcaaatattttaaagtttagacttcaggaaagtgatgcaagtatcaataaaataacaacggttttagataaggagatgaacatagagtctggcacatctctctatctttttagacaccttattgctcggaaagaaatcattatggatatgctggtaaataaaatatctagttgtccatcttctaaagaaattcaaaaaataattttttaagctaggacgaggtactttatatgattaatgatttgtttgtaaatgacctgattgaatggattgatgaatccggtaataactttatagaacgagttctctggattgatgaaggatatattattgcctttgtttatgatataaatgctaaaacaggatttccagaggctaaaaaagtttcagagattagagaagctatttctgatggtcgtgcattgaagcttaaatcagacccgtgggcaagaatcgtaagagatgaagatttgtcagagaaagaaaaagaacttagagatagggcttggcaaataatttcatttatcgttactcaagaaccctcaatatactatcgggattatagaggtactttagttcagcaggttattgaaaaatataatgcaggtagaactgaaggtgaattagtaccaataactgtttataaatatttaagaagattttggcagaggggtaaaaacaagaatgctctcttgcctgattatgcaaattctggtggtaaaggaaagcctaaatcttctggagacaagaagagaggaagacctagaaaatacgcacaagttccagaaattggtgttggaagaaatgttacagaagaagataaaagaatatttagatttgcaactgctaaattctataataattccaaagaaaatttcttaacgactgcttatgatttaatgattaaagaatattacgctgaagatttttattacgatgataatggagttaagaaaagtattttaattcctccagataaacgacctacatttacccaatttaaatactggtacgaagtagaacaaactgatatcagaaaaactatgatatctcgtaagggttcgagaaaatatgccttagaaaatcgagccattaccggaacttcccaaatggaaactattgggccagggtctagatatcaaattgatgctacgattgcagatgtatacttagtatccctttacaaccgcaactggattattggtagacctgttatatatgtggtgattgatgtttttagtcgcatgataacaggggtttacattggattggaagggccatcttggacaggagcaatgatggctttagccaatgcagctacggagaaggtcaagttttgtcgggagtatggtattgagatttctgaagatgagtggccatgcaagcatattcctgataccattttaggcgacagaggtgaattagcagggatgacagtagaaacattaatccctaatttaaatgttcgtattgaaaatactgctccttatcgagcagattggaaaggattagtggaaagacaatttcgcattattcatgggtatgtcaaaccatttgttcctggttatatagatactgactttagacagagaggaggacatgattatcgccttgatggtaggcttaacatagatgaatttactaaaatagttatatttttgattctccagcataacaatcatgattatctaattgattatgctagagatgaaatgatgattaccgatgatgttaatcctatacctagagaattatggcaatggggaattgccaatcgttctggtagactgagaacttttccagaagatattgtcaagctaaatttaatgcccacagaaaaagcaacaattactgctcgtggtatcaaatttaaaggaatgtactacacttgcgagaaagcaaggaaggaattttggtttgaaaaatctagaagtagtttattatctaagtcagagaaatcattgaatatatcatatgatattcgacagccaaactttatttatttacgttccccaaacggtagagaatttgaaaaaggttggcttttagaatcgcaacaaagatatttagataaaaacttttatgacattgattatttattagcatatgaaaaattgcaaaatcaaaaacatcaaggtactcggttacaggcaaaagctgatctgatagccaatatagaaagtattgttagtcaggctaaagaagagactgaggcagttttagatgatactataagtaatagacaaaaagttagtggcattcgacagaatagagcagacgaaaaaaatgctcgacgtaaaaatgaagcatttgaactagcaaaagcagaaactcccaatactgataatactaagaatctaataaacactcaatctgaagattccgaggattcaaaactattacagcctgaccatatggatttactcaaacggaaaagacaggagcgaaaacgtggaaagtaatgaggaagaagttgttagtattcctaatggaaagtcagcagttattgccagatacatagaccaaaaacttccagaatataacgctaatccattgattcaggcactacctcctatcctctcagcagaagaatttatcgataaagtaacgagaacaccagattttgatgaacaagagagggagctagaagcgcactacaggtttcattgcattgagaggctatctagatattttgatcctcaaaataaaactgttgaactacagaaggtcatttgtgcgctaattatgacgggctatttagctcggaatattctgaaacctgaatatgcaagtcgctctaggcaaatttataatgcaattaaagatggaggagggaaaaacttagaaaactatgttaatcttcctacatctgcttccggcctaaccctaattggcccatcagggatgggaaagtctacgaatttccaaaatattcttaatctttatactcaagtaattcttcatcctgagtatagtgtttaccaaatagtttggttgaaggttgactgccctcatgctggttctttaaagggtctgtgtacggatatttttcttgctgttgacaggctattaggtactaactactttaaaaagtttggttcctcacgcaactctgaagattatatgctggctcaagttgcccaaattgcccatactcatcatttaggggttttagttatagatgagatgcagaatctggttacagcaagaagacgtagctcagatatgttgaattttttagtaaaaatggacaatactgtaggaattccagtaattcgagtaggtactaatgaggcttttcctattcttcaaggaaattttagaaatgccaggagagggacaggagaaggcagtgtaatttgggacagaatggtaaatgatgatgaatggtatttcttcatggaaggaatgtgggaataccagtggacaaaaactcctgttcctttctcggatgaaataaacgaggttttttatgacgaaagccagggaattattgatattgctgtcaaactttacaaaatggttcaatggagagcgatttcaataggtggtaaagaaattattactattgagttaattcgtcaagctgctaaagacggactatatttagtcaagccaatgcttgatgcaattaggtcaggggacaaggagtggatgattaagtataaagatattgcgcccctagatactacagaatatcaaaataaatgtctatctgagcttgattccaaggatttgaaagaaattcgcagattggcaagaaagcaacagaatcagcagaaagtatcgccgaagctaaattatgtaattcttgagcttttgaacttggaagtagaacctgctaaagcaaaggaatgtgcagaacaagtaattgtttctagtgatgaagatgccgaaattccatctttagtcaaaaaggcatatgctcttgctttgcaaggagggcaagtaaatgagagcctgactaagacaaatactaagaaagctaagttaaagcccaattatcaagaaaatgatattcgacgaattgttgaaaatgccaataaggagaaaaaatctgcatacgaggatttgaaattggcaggcataatcaaaaatccagttgaagattttataaatatttagcttctcaatgcttagtttcttcccaactctgtatcccgatgaactgttatatagcactttagctagataccacattcggagtggaaataaaagtttcaagcaaactgacttagagctattcggttacagttctcaacaagtatgcaaaattactttaactaataatttaaattatttagtgaaaaacttacctttacgctcccagcaaaaagttgagaatttgctacaaaatcatacgttatatcccttttacgcaacttttttaatgccacaggaggcttggttactaaaaaactcaattagtaaaaaactcagtggctccatactagatgttgctaaggtggctactaattctattggtgattcaaaaaaatttttaaaattttgtcctgaatgtttagaaaaagatacccaaaaatatggcgaaccttactggcatagaatacatcaagtacctggcattttagtttgtccaactcatggtatcgttttacaggatagttgtgtaaaagttgaatcgaaaggcgtacattatcatgctgcgagcgtagataattgtttagtagcctgcaaggtcaaaaatttgacaaataacacagtaaaaacactcttcacactggtgaatgatattaattggctaattcatagcaattttgcctttcaaggtttggcttggcttcgcgctcagtaccagcgttacttagtggataaaggtctgctacaaacctttcctggtggcaagtttaagtttgatgagtatggttttgcccagcttatatttgagttttatggtcaagaatccttagaagccatcaatcccaagttgactcaacatcaaggtaaatacttttctcactgcttgtttggatgcgacttaagcccagcaattgaccggataactcatatcttattgataaaatttttagcaaattctatagaagagttttttcagtaataatctgcatataaaaactgttaaatacattaatataaagtaataaataattaagaaaattatctttataggttggtatttcaagtattctcagattcgtgagtaaggtaaagtaagtaatatcatatttatttcacaccacgttgcatctactgaaatttggcatctaaaaatgattgttgatggcaacttacttaggcagattccctcagaatcaccaccaaagccaagagagcttttaatgtctcagttaccatatatggatttaacttttaaccttattggtgagacattacctttcgaccacggctatgagctattttctgcgatcgcccactttgaacccaaacttcatacattagacacgctgggaattcacaccattgcaggtattcccaaggatggtgtaattaatctgacccaaaattctaggcttcgtgttcggataccagtaaatcaggtacatttagtttacccattggcgggtaagtccttgagaattggtaagcatacaattcgtttgggtattcccgacatatgtttgcttcaacctgccgagcaattgcgatcgcgcattgtggtaataagaggtcatgaagaacctgaaacttttttagtcgtagcgcagcgtcagctagaacagctgggtatccaagcaaccgctagcattcccaccaaagccaatggcaaaccaatacgtaaaactatcaaaattaagcgatttacagtcgtgggttttggattagaagttacaaatttaagcaatgaagactcactgacgttgcaaatacatggtgtaggaggaaagcaaaagatgggttgtggactcttcatgcccattcaagaaaggcaatagcaattactcgaaagcagataatgaagacagcagctaaccccaaaattcagcttaatctcggcgatcctagtatgaccttattgcatcgtgctggggtggcaggactttggatgacgctcaaaaaactggaaaaaatctatccaactgctgctcaacgtattggtaattttacttggttgctaacccctagtaatatcagtctttattgggaaggacaggatttcacagttttagactggttgctgaagcattcatttcagatcagtgatgagggtttaatttccctaacagggttagattctcaaaacatggatattcaaacgcaaataattatccaccaaggtatcacagcaacttttatacaacataataaattttttaagtctgcgggtcaacaatctaagcaactaattattgatggtattcaactcagggttgattataagaaagctgcttcctatgctcatcaacattttgctaaacatttatgtgaccagtacggacaattgctacaagagccaattggtataagggggtggctttatccaggagcagtagttcgccattatgcttttaaagaacaaaccgcatttgaagaaaaagcagaatatgctctagcgttgttgttcgctcctgtggcttgtcaatattttgtgctgcgatcgcacaccgaaccatcacatacaaactatgttctggttgttcctgaagtaattgatttagaactttatgcccagtatttgtggtatttgagtaaattagattataaacattttcacgtatctagcttaggagatgctggattaaaatttattacttatgaagcaaaacaactagataatttcaattttatcaaacgatgtcaagtaatctcctttagtacaaaagcttggtcagagcggcaaaaaactcgtgcagaaatagcaatcatagaattaaattcttcagttagttatctctataaacttagttgtatttgttttcctaattgccaagttgttatatataaaaatcaacattttttgcttccaagtttaatgaaaggaataattgccaataatctagcaatgggttggccttggtgggctaattggatctcagttattaaaaataataaatcatttaaacaatttactgatgagtatataggaattaataaaatgattcaggactcagaatgggacatagaagctcaaaaattatttattcaagcttgtcatgaagcattaaggaaaatatacgccaagatttatagcagaatgaaagaaggtggatatgctcaaatagaacgagaaaatacacgcattttatctcagctaaaacgctgcaccaatgctgacaatttcagaaaatttattgcagagttttgggggagggcagggcaaatgacaattctggaggaacattgggtggaattactaccattgactacagggataggcaattggaaagtagccagggacttaacttttattgcaatggctagctatccaaagaataaaataacagaggtataggtaaaatcatcacaactatttgagctaaatcgtgagtaaacgttagattttttgatttgattaagcacaaaatattaattgtttaggtaattgttgaatgtttcatctgttcggtaacattttgactacttatggaaccgccgctaataatcgtggtgaaaatgaaggtaacacaactactttacaaaaattaatttggaaaggtgaagttcactctaccgtttcatctgaggcaattcgttgggcattgcgatatcattggcaaaatgctggctatcctgtgaatagacgttgggatgagaatgctcaaccagtagcggatcacatctgggaagatcctaattttgatgatattcgcttcattgatgatgatgtgttgggatttatgcaagcggaagcggcaaaagttgaagcagcagatgaatccgaagttgaaatccagaactcaactcaagatgagaaccaaacaacctctcaaggtgaggagaaaaaaacctcacaacgtaagcgcaagcaaagacctaaagggagaataagtgctagacgaggtgtattagaagtcactcgtgcagtatcaacaattccttatgctggtgatattactttcaattctatgagtggaaagaaaggacgaacatctctttatgctacagaagttcacgctactcggtatcaatatggctttgcattaacacccaatagactcaaagataaatctcgcattcatgctgtcttagatggcttaatttcgattggagacgtggcaggaaatcacgctcgtttcttttatgatttttctcccgatagcataatattacggtggacacatgatttctcacctcgcttactttactgctttgaagaagatgaacttagaaatatatcaacacccgatttagtgcgacgggtagaagctggagatatagaccctaaagaattatggataggaggggcaattgctagcactctagaaaatttaggggccaatctttttcccggagtgaaggcaacagttgaagcattaaaacaggtgattattgaagatttgcagttgtcgttaaggagttcatgatatgacgacaattgttgtaaaagtagaagttcccatagcttgttttcgccagtctcatgctagggaatacgctgaaacctaccctgtaccaccgccatcgacagtatatggaatgttactatctctggttggagaagttgatagatacaaacactgcggcgttaagctggcgatcgcacttctatctaaaccagaaaagtcaactgttattcgtacctgccaccgatttaaaacgaagaatatccatgaatctaaaaataataaacctgattaccaggatttactaactaatattgagtttgtagtttgggtagatgctggggcagataaagccaaaccaaatttagcgcaacgtttagaagaggcatttactaacccagcttctattaataggtttggtggattatgtttaggtgaaagtcgggatttagtgaatgatgttagcctgttacctgaaaattactatgcagaatcaatgcgatggttaattcgagatgattatgggttactaaccttaccttattgggtagatcatgtaggttcacggggaacgcgatggctgtgttacgaaattcaggaatttcaagtatttcaaccacccgaattatcttggacttcaattcaaagtgattagagggcattatttacttttgcaagcatctttgcttgggcaatttaaataccacaataaataatcttgtcttcttgtttcacaagcattttagggatttcatatactttcaatgtgcttgcaatttcctggaacaccttcaaaacaagggttagagctttagcaactttgcttttgctatgaatagctattaatttttgcaacttgactaatcctaattggaaggtgcttgtaaaattagtacagagctttggctagtcaacaggtttgatgatcgccgtgctttaacattagatgtcgttaggcgttgagcagtgattaacctgaaggcttgctccgggatgttgtaggtgctttaacattagatgtcgttaggcgttgagcagcaccggtaccgcgagtagtcgcaccaatattcatatgtgctttaacattagatgtcgttaggcgttgagcagttgaatgcgaagttatcggcagatgttttgttgttgtgctttaacattagatgtcgttagacgttgagcagtgaccattggtgtatccatcaatcctgactgctgcgtgctttaacattagatgtcgttaggcgttatctacttttgatacaaatacttttgaaatacatacaaaactagctctgccaaatatctccttttcaagacatttttgcgattattttttcccactgctcaatctggttctgtagttgtaattgccgatcgcccaaatcttgactatcatcaacagacaaatcctgaccgctcaatcgctcacgatagagagcaatcagttcggttagggcttttttattgcttgctgatcctcctgggtcagagaactaacattgactggaatcaactttctgccaattctctctacaaactcagaccgacttaaatccatactgtcggcgatcgcatctaatccatcaatcccggtaggagttagggctaggttaactcgtttcttcacctcatcgtacagttctggtacgtctttttgacctttttgccctttcttacccattgccgtctagtttttgctttcctcccaatcatagtaaacacatttagcacttaagttaaacattaaaattttttccaatactttaggtattgtgtaatccctaatttagttagataatacaggcattgtgtaatgcctaagcaggcatctcgtaaggatatgagtaactaattgcaccgtttgattcctcaacatctcaacggcttaattttcatgggcaagcattaattgcttcgtggccaattcagattaatcaaaatctgccagatgatttaggcatttttcaaaactatatggttagtttcttccctaaaccttatccagatgaaattttatatagcgtcattgctcgttatcacattagaagtggcaatacgagtcccaaaattacacttcaagagttattcaattcacaaactactgtcgcaacagtagatttaccatcgaacctgaataatttaattcaaaacctacaatttatctcaaattaccaagttgaagatttgatatataaacatactctctatcctttatatagcccttttttacctgcaaacaggtctagtcaggtactggaatctatgaaaggagattatgggggagatattcatacaagagccggaattatggcaagctcaattactatgccaaaatattttcggttttgtccaacttgctgggaagaagacttaaaaaattatggcgaaccttactggcatcgcatccatcaaataccaggggttttagtttgtccatttcatgatgaagttttgcaagatagcctagctcctttacacggttttaataagcatgaatattatgcagctagtacagacaaatgttctattactaaagaaccaagtatttttagccctgacacgttgaaaaaattactggtattagctaaagatttttggtggttactcaatagtgaaataccttgccaagaaccacagtggtttcgcaaacagtacaccaatctgatgattgagcagggtcttgcaactgcaactggacgaatttaccagaaaaaactactagataattttttgtttttttatggtcgagaaatgctcagtgccgttaattcaatagtcactcataatgattcaagcaactgggttactagcattgtcaggaaacataggaaatctttccatcctcttagacatctgctgatgatgcgttttttgaaaacatcagtagaggaatttttcaagcaagataataaatacaagccttttggtgaacccccgtggttgtgtctcaatgctgccgcagagcattacctacaaccagtcattaccaatttagtcattactttatgctgcgatacaaaaaagcctgttggtactttttcttgtacttgtggaatggtttattgccggactgggcctgatgaaacggatgatgacaaacttcgcattggtaaagtaaaggcattcggtcaactatgggaacaaaagctgaaagaatttgttgaagttgaaaagttgggtttgcgggagacagctagaagattaaatgttgatcccggaactatcaaacgctatgtatctctgctaaaactgaccacttattggcagactagaaaggaaaatggctctgtagacttacaggaagtagcagaaatacaccccaattctgcaactgaactcaaattgaaacacaggcaagattggatggctttacaagcacagaatcctgacgcttcaaagacaactctgagaaaactagcaccagccacctatatttggctatacagaaatgatagagaatggctcaatcaaaactcacctgcattacaagttgctgttccttccgttgtgagagttgattggcaggaacgagatcggcaaattctcgcccaggctcaagacgcagtgcgatcgctaattaacgccgatacgccagaaagaatttctattagtagggtaggaaaaactatcggcttactcgccttactcgaaaaacacctcgaccaaatgcctttaacaaaggcttacttagaatcagtagttgaaactgtagaagattttcagatgcgccggatcaagtgggcaatcaagttgcttgatgaatgtggagaagaaattatgcgctggaaggtagtcagagttgctgctttgcgggaggattgctctgaaagagtcaacgcatttctggaaaatgaacttgacaaagcgtacaagaaagagaggtgattccattcacctctccaagtgatgagataaatgctttgtgtgttatgctgcgtcggctaccagtaagccattcacagcgacgatgatgatttgcgctgccaaaggagtgtcacaacgtagcttatcgtcactattacagggttgtgctatccattgaccctccagattttggtagaaagtgccgagaagttgggaaccattccaaacacggtaaagttcaccaaatacctctgataccgaatcaatctcaatttccggtgctatttcctcacctagctgctcaatgtactcctcaaactctaattgagccaaggcttggttatcaaattcatcctgtacaatcatcatgagtcacctcgttaacggggttgaacaaaaggcgatggcgtaaaacgcccgcctaaaaggcgatcgcatttctcttgccggagggcgatcgcctttttgatttcagattttattttagctactatagtggctatatacaatatatgtatggaaaactttattcagtcacttccactgtgctaagaaaatcctttaaagaaatgcctaaagccaagcaaatagcctctaacaccttgatagagacactttcagactcgccgtactctagttttttcaggttttggtgagagcattccccacccttagcagaaatttcctctgccaatttctgccgggattttttaccacgcatacgctttaaaactgctgctctatctttattccagctaacggccacaacgtctgaaacataaatatacattttagtttctctattcctctcattgttcatataatagctacagcagtaaacaaaagttattaatttcggctactacagtttacaaattatgggttagaggtaagcgatcgcagttaatcaagttttcctgtcagtcaaaagagagtaactgtttttgctatgaataccacttgtgcatataatttcaaaggttctcccagaacaaatacattagccatctacagcatctagagccttgacacccgaagaactaaaacagcttgaagacaccctatggcagagtgcagataccctgcgggctaactctgacctcacatcgaatgaatattcgacccctgtaatgggtttaatatttctcaagtttgctgataataaatatcgtcagtatgaagcggagattttacaggcttatgaagcattaaaagggactcgtagagagaagaatatagaagaaatagctattgagaaatgtggtttttatttaccaaatcacgcgcgttatgactatttattaaacttaccagaagaggaagatatagctaaaaaaattaaagaggcgatggagtccatagaaaattataagccagaactcaaagacacattgcctaaagatgaatatttccgcctcactcgtacagacaaaggtattcctaaacaactattaaaaaatttttctaatattcctcaaaacgccactggggatatatttggacgaatttatgagtattttttaggtaattttgcactttcagaaggacaaggtggaggtgagttttttacaccccgttctgtggtgcggctaatggtagaaattattgaaccattaaaaggtagagtatttgatcctgcttgtggttctgggggaatgtttgtacagacaggacaatttattcaagaacagcaagaaaatcaaaatcagggtgtaattaatgatttatatgtttgtgggcaagaaaagagactggaaactgtaaaactagcaaaaatgaacattacagttaatgggttaaggggagaaatcaaacaagcaaatacgtattatgaagacttgtttaatagtcttggcgattttgattatgttctggctaacccaccctttaatgtggatgatgtaaatctgacacaggtggagaaagacccgcgatttaatacctatggtatcccccgcaataaaacaaaagttaaaaagcaggatgagggtaaacaaacagtacctaatgctaattatctgtggattaatttgtttgctacatccctaaaacctaaagctagagcagcgttagtaatggctaactcggcttctgatgcgcgtcacgcggaagcagatattcgccaaaagctgattgaagagaatttaatttatgggatgcttgctctgccctcaaatatgttttacacggtgacgctacctgcgacattgtggttttttgataagggcaagaccgatgataagattttgtttattgatgcccgaaatatttttacccaggttgacaggtcacatcgagaattttcagcagaacaaatcagtaatctggcggttattagttatttgcgtcagggtaagcgacatcggtttattaagttgattaatcgctattttcagcaaggaatggcgaagttaaaagaaaatcaatcacaggtaaagcctgtttctcagcaattaatggctgtgttgaatgatggtgcagatgatgtcaaagctagggaagttgctgttaatttcctcaatttgtgggatgaggtaacagatttagaaattcagtatcaaggttatttagataaatataattatcctggaataaatattgatacccaaaatgaggcacagcaaaaactaagtgccgcatttaaaccgttttttgataatttccatgttgagctaaaacagcttgataagactgtgcgcgctcgtgaagcagagctaaaggagaaagcaaaggaagcagaggcgaagaaacgggggcagattgataaacaaattaaggaactgaaaagcactttggaaacgctgcatgaggaggtaaaatcagcagaattattttttactcatattcgctggttacaggaacgttttcctaatgcaaaatatgaggatgtgacagggttgtgtaagttggcaactttggaggaagtgaaagaacaggattattcgttaaatcctgggcggtatgtgggggtagtgattgaggaagatgggaaaacggaagaggagtttattgaggagattttaggtttaaatgaagagttggaaaaattaaatcaagatgtgcatttgttagaggggattattgctcataatttacgtgagatagcgggggatttatgagtgattatttaaatcaatttcagaaattagatgaagtggggactattgcaagaggtaaatcaaaacatcgcccaagaaatgagccatcgttatatggtggaaaatatccatttattcaaactggagatgtaaaacatagcaatctttacataactgagtattcccaaacatataatgaaaaagggctatctcaaagtaaattatggcaagcaggtacattatgtataacaattgcagctaatatagctgatactgcgatattaaaatttcctgcgtgctttcctgatagtattatcggatttataccctacaaaaataaagctgatgttcgatttatcaaatattgtttagatacatataaaattcaaattcaggcaatttctcaaggcacaacacaagacaatttgagcgtagaaaaacttttatcgcttaaatttagaattccattaatttccattcagaaaaagattggggcgatactttcagcttatgatgatttgattgaaaaaaataatcgccgtattgccatattagaaaaaatggctgaggaaatctaccgtgagtggtttgtccgtctgcgctttccgggacatgaacaggttaagtttaataaaggcatcccggaggggtgggagagaaaaagattcgatgaattttgtctactccagcgtgggtatgatctaccagatgctaaagtaattcctggccaatatcctgttatcgcttcaacttcaattaaaacgtaccataatcaatttaaagttaaccctccagtaattacaactggtcgctcaggctctcttggcacagttttattcatcaatagtcaagcctggcctttaaacacgacattatttttaaaaaacttttatggtaattcaccatacttaatttactacacactaaaattcttaaaactggaaaattttaattctggtgctggtgtacccacactaaacagaaatcatttgggtggattgtatatgtctgttcctcctaaaaacttgcaaaataattttactgacaaaatagcaattatttttaaacagaaagagcttttagttaggttaaataataaacttgttgaaacacgcgatcgccttctcccccgcctcatctcaggtaaactttccgtcgaaaacttagacatccaattcccaccgagtatggctgacacaccaccataaaagtaatactcagtgtttatcctataaagtcagggcagatattgacaaatttaagcagcaatgggctaaaatttgtacattgatggactaataatatcaaaaacagcctatagccgtgtagtttgcctaaactatgcctaactttatctctgaagatgacatcgaacaagcggtactccgcaaattagagcagcagcacggttttaaattactcaactgctacaccccaaaccctgacgacctcaacgacagttcaaaccgcacagataaacgagatgtcatttttagcgatcgcctgaaagctgcggctatacgcctcaaccccaccttaccagaaacagccatagatgaagctttaaaaatcctcaccagtcaacgtcagtctatgtctcccatcgctgcaaatcgggaaatagacgggctgattcgtgacggtatccccatacaatatgaaaatgcccaaggtagaaccgaacccatcaaagtacgagtaatagattttaacgatttcaggacagatttcaataatgaatatttagccgtttcccaactgtggattaaaggagaaagaaattatcgccgtcctgacatcatcctctacatcaacggtttacccctggttttcattgaactgaaaaattccaacgtcaaattacaaacagcctttgacgataacctcaccaactacaaaaaagatattcctcaactcttccttgccaatgctttctgcattctttccaatgcactagaaaccaaaattggcagttttaccgcagactgggaaaacttctttaactggttacgggtagaagatgaaaaggaaaaaataaatcgtcagcagattcaggaatctggtactagcctagaacgagccatagatggtctttgtcaccctgccaaactcctagactacatcgagaattttattatttacagaagtggaactcagaaaattgtcgcccaaaatcaccaattcattggtgtgaatcgcgcaattgatgcctttatccatcgggaagaaaaacaggggaaattaggcgttttctggcacactcaaggctcaggaaagagcttttctatgattttttatgtccgaaagatttcgcgcaagctcaaaggcgattttacctttgtggtggtaacagaccgggacgatttagacgggcagatttaccgcaatttcttaaacaccgaaaccgtccaagagaaagaagctgctcaacccaaaaacagtaaacaactgcgggattttctttctttcaacaagcggatagtttttaccttgattcaaaaattccgctacaaaaagggcaagaagtatccaatattgagtgaacgtaacgatatcatcgtcattgttgatgaagcacaccgcacacagtataaatccttagcggaaaatatgcgggcaggtttacccaatgccaactacctcgcgtttacaggtacacctctgttaggtaaagaacgcaaaactaatgaatggtttggggattatgtcagcgaatacaacttttctcagtcaatagatgatggtgctactgtccccctgttttaccagaagcgagtaccagaggtactgattcaaaacgagaatttaagcgaggaattttaccaaatactcgaagatgaaaaccttgatgatacgcaacaagccaagctagaaaggaaatttgcccgtgaaattgaggtcattaaacgtgacgatcgcttagaaacagtagccaaagatatagtttaccactttccccgtcgtggttatctaggtaaaggtttggtagtttccgtagataaattcactgctgtgaagatgtacgacaaagtacagtatcactggaaagcagaaattaaaaatttagtgggacgaattaggaaatctaataatgaaatcgagaaagtgcgcctcaaaaagattctcgattttatgcgcgaaacagaaatggctgtagtgattagtttagaaggaagcgagagcgaagagaaaaaatttgctcaacaaggactcgatatcaaaccccaccgaaaaagaatgaatacccttgatgctcaaggtcatgatatcgagtatcaattcaaagattcagaaaatcccctgcgcttggtgtttgtctgtgccatgtggttgacaggttttgacctacctaccttgtctactctctacctagacaagcccatgaaagaccacacgctgatgcaaactatagcccgtgcaaatcgcgttagtagttatcagattaataatgtcactaaaaccaacggcgagattattgattactacaatgtcttccgtgatatgaaaaaagccctagcagcttacgctttgggcaatgatgaaaactccctagttccagaaaaatctgacctgtttaaattacttgatgatgcgatcgcgcaaggactaaacttttgtcatgaacgaggcattaatctagaaactatccttgccagtcaagataccttcaagaacttagagcagtttaaccagtttgccgacaccctactgcaaaaagatgaatggcgtaaagcctttgtggtttatgacaataccattacctcactctacgaagcctgtaagccagagatattaaaccaaccacgccccctggtgtcagtttttcaatacttacgaggagtcattgatagtattatcgagcgcaaagatattggtaacgtcagtttaaaaattgccgagttattagatgaaagtatagtcacagatgatcaaggagtgaccacacaagagtatagtgcgaaataccaaattatccagaaaggtgaagtttgggatttaagtaaaatcaactgtgagcagctaaaagccgaatttaaacacaaaccctataaaaatattgcaattaccgatttaaggagcttcatcgaagacaagctcaaccgcatgattcagcaaaatactactcgtacagactttgcccaaagactacaagcaatcattgacaaatataacgctggtggttcatcaactgagaactactacgaagccctggtaaactttgccgaaaacctgaaacaagaagcagaacggcatattcgggaaggcttgacagaagacgaactggaactatttgatttactcaagaaagacaaaatgactgcggatgaaacccagaaagtcaaattagctgccaagtcccttttacagcgactcacagcagagcagccaaaagttttagtgcaagattggtataaagatatgcagagtcaacgcagggtgaaatccgtagtggaagcagtcttagatcaaaatctgcctgaaagctatgatcgagcgttatttaagtttaaatgcgacacagtatttgatttgatctatgaccaggccagtaaaggtgcaaagtgggcagtctgagtaatggaaactatgtctatctatgaacgcgatcgcatgaagacgaaaatcagatttatgagatttgtacggctggcataatttatcactgctttcgacttttcaagtagctctacttaagcgataattagaacttgaagacacatgatgactataacaaaatgggccagcatttatacgctttacttgttggtatcgacaactatcctgaccccaatcatcgccttcaagggtgtgtgaacgacataacagtaatacaagagtatcttaacgaacgggtcgatcagcagcagtatgaactgcattcattgatacttaaaaatagtgaagccactcgtcaggcggttattaatggcttccgcaaccatctttgtcaagctcaacaaaatgatatagttctgttttactacagcggtcatggttctcaggagttagcaccgaaagaattttggtatttagaaccagaccatctggatgaaactttagtatgttatgacagtcgtactgagaacggctgggatttggctgataaagaattggcactactgattggggaagtcgcagaaaacaacccccatatcacaattattttagattgctgtcactctggttctggtactaaagatcccatgcagacagctaaggaacgtcgcttccccacagacaagcgatcacgtccattagatagctttatcttttccctcgacgatttagagagactttcagatacccacaaccccgaaaaacacccgactgggtggaaaatccccagaggtcgtcatgtacttttagcagcttgtcgagaccacgaaacggcaaaggaatactatggtggtggccaacaccggggtagtttctcctatttcttactggataccctttctaaaactaacggaaaactaacttatcgagatttatttgcacgcaccaacgctattgtccgcagtgaaattacagaccagtctcctcagttggaagtaaatgatcctgaagatgacaataaattttttctcgatcgcgtgatcgctgaacatgacccctattttatcgttcagaatcacagaacctacggatgggtaattgatggtggtgcagttcacggagttcaagcacctgaacatggagaaactactttactagcattgtttccctttgatgccaatattgatgatctacgtgacccatcgaaatctgtgggtatagcaaaagttactcaggtactaccaggtaagagcaaaatagatattgaaggtatacaaaacttagctgctgataacacttttaaagcagttgtgacgagtctacctctaccacctttaggagtgtactttgagggagatgaggatggtgtcaccatagcaagggaaaagctgagaacagtgggtaatggtaagtctccatcaccatatctccgcgaagagaaagaagctagtcaagctgagtttcgtctgttgtgtcacaacaaccaatatgtaatagccaaaccaacagatagccgacctcttgtagaacagattgatggttacacaccaaaaaatgcagaaatagcaattaaacgcctagaacatattgcccgttggacaacaattgctaaactttcaaatactgcggcaactcggattaaagctggtgatgtgaagatggaacttatctttgctgatgaggatttaccacaatcaaaccagatgcgtttgccatacaaatataataatggaacatggcaacgaccagaatttagacttaaactcaccaatacgacgaaaaagccacttttctgtgctttagttaacctgtcagatagtttctccattagtaccccgttttttgaagcaggtagcattagactggaagcagaacaggaagcttatgctttagatggagaagaattgcaactagaagtcccagacgagtattgggaacagggtatcacggagtacaaagacattattaaattgattgttagtaatgatgagtttgatccaagattgttaaatcaaagcaaacttgatgctcctcggcttaaagcaatagataggaattatgcaaatcaaagtagtcttgatcggttgatggatcgtactcaaaatcgagaaattagagcgaaaagtgacgctgttagatttgatgattggtacgctgaagaaatcacaattactacagtccgtcccctgcaatctacaccagtttctcagcaacaagaacaacaattaggcgcaggggtaagattacaaccacatcctaatttagtggcaaatgttagcctcacaactataccagaagtgagccgagatttgggtaacaacattgtacctcctatcttgagagaaaattccgaagttattcaaccgttccaatttactgccagtcgtgctactgaccctggattaagtgtattggaattaaacgatattcaagattacaaagttgttactcctaatgcacctctaaaattatttgttgatgcaccactagcagataatgagtatattcttcctatcggctatgacggagaatttttcttgccgttaggtcgtggtcataaaactttacatggtcaaacagaaattgagatagaacaattaccagccccagttagtcaaggagagaaaagcctacaaggttctattcgcatcttttttcaaaaaattatcaaccaaaaattaggaaaaaaatataactatcctctactcagagtagtagaagttaatgataatcaacaagttaattatctaccagatgaggtaactattaaccgagttaaggaagcaaaaagaattgctgtttatattcatggaattattggcgatactgaaagtttagtggcaaccatcaaacagcctatattacaaccagacagacaaacagtttctatcagcgaactttatgatctaattcttacctttgactatgaaaatctcaacacttccattgaaaataatgctcaatatttaaaaaagcgattgagagatgtaggtctgggagaaaatcacggcaaagaattacatattattgctcattcaatggggggattggtatctcgttggttcattgaaagagaaggaggaaataaagttgtccaacacttgattatgttgggtacaccgaatgcaggttctccttggccagttgtagaagattgggtaaaactcactttaggtattgcacttaatggtcttgctatcattgcttggactgcaactgtggtagctggactaatgggtgctttagaaagaaatattcgggtagcattagcccaaatgaacccagcttctgattttctcaattctctagcagccagtgatgaccctggtattccttactcaattattgctggtaatacttctatgattacatctgttgttccagcagcattagagcaacaaccagagaaaaattctagtgtgctagaacgactcaagcaaagtttatttaatagagttgtagctttaccttttggtggtgaaccgaatgatattgctgtgacggtggaaagtattaatagcattcctcaagggcgatcgcatcctccccatattcaagaagtaccttgcgatcacttgagttacttcctgaatcaacctgatgaagttgggttacaagctttgattgcagctattacgaatcaagaatattcttatggagagttacaaaaaccttataaagatcaagaattacagggactttatgaaggattacaagatttatgggaaaaacaagaaattcatacttgttctatttgctcgaattttatcacagttaatcaaaaatttgaaggtgctagtaatgttgagtctttcattgcgaaaaacagaaaaaaagtggaaaatataattgttgaaattaatagcacatattcggcaaaagaaataaaagataacttacatcaaattgcaattatagggttctacagaagtaacagtttccgttcgttacctgcaattatttcccaaaaagataattttttacaaatcgagcttgaagacatttttagctttttagatcctaaagaaaatcaacaaactgaaaatattccatctttttcaacagagataattttgtttgccgtttactatcagaaggagaataaacatggatactaagaaagtagaagaggtaaggaagacaggatgtactcttattgcttttaaagatggtaagtatgaaagagcagcatctgaagattttaaaacagaagctgacatagttattttaattcatggctttacgagtcatggagaatacatgggtcaggaattagtaccttatctttatagtgaaaattatcaaatcttcttgtttaattatgattcttacaaaggaatattatctgctgtaaggagtttacaagaattactggaaacgtatgataatctaactaatcaaaaaatacgctccaagaaaatattccttattgggcatagtatgggtggtcttgtagctcgtcaatttactatagatgatgcaaagaaggacaattcagataggtttataaaaggagtgatcatgttggctactcctaataatggtgtattacaaaataaattaagtaacgaaaattggagaaattttgttaagtatttaatatctgtttcagaagaaataggcggagtattcccacaagccagaacattggagtgcgtcgcggtaaaagaacttgctaaaattgatgagtataatattattgataaattgaattacgaatgggaaaagatgagttgcaatttgccaccaagtttatctatatctggtggacaaaattatcttgaattcactaataaattaattgaaggaataattaatcgtggaattcagcaattaatatctgattctaatacccgctgccctaatgatggaattgtgcttgaatgcagtgttgatatgaactcatgtattagctatccccaacaaaatcaacaatatatacacctgaataattatcatgaatattcaaataccaatcacaatacaattcatatccaacaaatagtatcaattaaaattgtagaatggttacaaacaatcagcaaaaaaaatacgagtttactaaataacgcataataataaaattgattgtagtgcttttgaatttttagagttaacataacaattatgtctaaacataaatttaaccttaattttgctattattatcggtattaataattatcaaagcgggatcaaagagctagaaacggcagttccagatgctattaaacttgctgaaattctacaaaagcagcatgatgctctaaaaccacaatatcaagcacaaaataaatatgaagtgcaattatttttaaatcaacgcgctggtcttaaacaactgaatcaattaattgcagattttaaacaaggtcaaataccattagacagaggtaaagttacagttacagaaaatgatcgcctccttttttactttgctgggcatggaattgctttagatgctctagaaaatcaagaaggcccagtgggttacttaattcctcaagatgctatatcaggggatagcagtacctacttgccaatgcaggaattgcatgatgctttaaactcacttccttgtaggcatatgttagcaattcttgattgctgctttgcaggagtatttcgttgggcaagtctaaaaagagaaattgtgcctaaagtaaaagtatataaggaacgctacgaccgattcattagcgatcgcgcttggcaagtaattacttctgctgctgatgaccaaacagctttagattctttaggttcacggggtatggtcacagaggggaacgaagttcattctccctttgccaaagctttgtttgatggtttatttgggaagggtgcagacctaaataaagatggtatcatcaccgcaactgagctttacttgtatttaagagatcaagtcgaaatccttacagaaaataactacaagcggcaaacccctggtttgtgtccactgaaaaaacacgataaaggggaatttatctttttgtcgtctgaatttgaccgaaataatttggaggatgcaccgccactaaatttagaaaataatccctatcgaggattagaatcctatgatgaaaaacacagtcatttgttctttggtagagaagaacagattaaaaagctttaccagaaagtagttgctaacaaccagaagttaacattagttttgggtgcttcaggtactggcaaatccagtttggtgaaagccggacttattcctaaactcaggaaagataaaacttggtttatcctacccccttttcgaccaggggagtctcctttcaaatcattgaataacgcactagaatcggttaagcagcctttgattgctgcttcctcaacgacgacaccttctcgtttgcttaccccagccgaagaaagccttgcaaattggtttaataatcatcctcaagcaaagctactggtggttattgatcagtttgaagaactgataactctgtgtaaaagtgacaaagagcgagagcaatttgagcaactgattaaaaatgcaattaccaaatatgccgacaaaatccatgtagttatcaccttgcggcttgactttgaagcacagcttcaaaactctgtacttgaaaagttctggaatgatgagactcggtttgttgtcccaccaatgagccagaatgaatttcgggaagtgattgagaaacctgcactagaaaaagttatatattttgaccctcccagcttggtagatgacttgattaacgaagttgtacaaatgccgggtgctttacctttgctttctttcaccctcagtgaattgtacttgaaatatttgcaggagcggagagataaccgggctttaacgaaagaagattacgaacagttaggaagagtagttggttctttaaccaaacgagctaatcaggaatatgatcatttaattcaagaaaaccccgcttatgaaaacactgtacaacaggtaatgttacgaatgatttcattgcagggtagggagtcagcacgacggcaagttcctaaatcggaactggtgtatgccaatgaggaagaaaataaacgggttcaaagaattattaaatgcttttctgaagctcgcttaatcgttgagggttctaattctcaaggtgaaccttatgtggaaccagcacatgatgctttagtacaggggtgggttaagttacaggagtggattaaacaagagcaacagaatttacctttacaacgacgattgacattagctgtccttgagtggaaaactaagaaacaaagccaagataggcaagaagcaaagttcctttggaatgccgatccttacttagatgttttaaacaaaatactcaattccagtgacaattggcttaaccaagtagaaactgagtttgttaagtgtagcaccaacctcagagaaaagaatcgtcgcattagaatgggcttggttgctaccgcattctcttttatctccatattttcttttatacaatggaaacaaaatcaagaagctcagagtatcaacttgagtgtatcttcaaaaactttatttgctgctgatcaacaaatagaagcgttagtagaagccataaaatctgggaaaaagctcaaatctgtggttataccagaagcaagtaccactcaccaggttgtaacaactctatatcaattagtttacagttcgatagagtataatcgtttgcaagaagaaaaaggattttatcgtgctagttttagccctgatggcaagatgctggtttcagtaagtcaggacaatattatccaattgtggagcttagatggtaagaaacttaagaaaaattttaccagtaatctttcaagtgtagatagcatcaactttagtcccaacggcaaaatgctggctctggcaggtaataatgataattttatcgaattttggaatctggatggagaagataaacccaggacgcttaaaggaaaactttcaaaaacaaatagtgttagctttagccccgatggtacaatgctggctttaggaagtaacgacggcatcatccaattatggaatttagatagtaatgaagttaaaacttttactactaatcttaaaataaatagtgttagctttagccccgatggtacaatgctggctttaggaagtaacgacggcatcattcaattgtgggattttcgtagcaatgaaatcaaaaattttaatagtaagtataaaataaaaaatgttagctttagccccgatggtacaatgctggcttcagtaagtacaggaatcattcaattgtggagcattcaaacaggcgaaaaaatcggtgcgggaagggaactcgtaggggatgtggattgggttagtcgtgttagcttcagtcaagatggcaaaatgctggcttcaggtggctataacggcattattaaaatctgggacactgaaacaggtaaagaactcttaagcatccaagggagtcgaggtaggactggtgcgtcaattatggatatcacttttagtcctaacggcaagatgttagcttcagtagatgatgacaagtttatcaagctctggaatctgaatggtgagaataaatccaagatgctcaagggtcagctttcaaagataaggaatattagctttagccccaacggcaagatgttggctttggctggtgatgataagtttatcgaactctggaatctagatggacaggataaacccagaaaacttcaactacaagtttcaaagataaggagtattggctttagccctaacggcaagatgctggctttagctggcgatgataagtttatcgaactccggaatttagatgaacagtatgaacagtatcaacctggaaaacttctaggacataagtcacgtgttaatagtattagttttagccctgatggcaagatgctagcttcagcgagcgatgaccagacaataaaactatggagtctagatagaaacaaagaacccacaactttaaaaggtcatagtaatttggtcaattttgttagttttagtcctgatggcaacttcctagcttcatcaagtaaagaccacactatcaaactctggagattgaaagacaataaggaagtctggagtaagaaaattgggtctggttctggtggccaaacctggtgggttggttttagccctgatagcacaatattggcttcggtgggttcttacaattttatccagctctggaatctagacggtaacgaattcagaaggcttagaggtaatctttcaaatatcaatagtgtagccttcagtcccgacagcaagatgctagcctcagtagaaacgacagaagattcagtaggtaaagcagaggaaagcgtcatcaaattcttaaacttagaggggcttgaattcaataggctcaaaagccaatttgtagatattaataccatcagtttcagtcctgacggcaaacttttagctgtaggagttgaagatggcactgttatattacacaacttagatttagataatttattaagacgcggatgtcattggatacgtgattatttgcgaaataaccctaatgttagtgaggtcgatcgccatctctgtgacgatgtaccaccaattactacaaatcctgagaattaggtgagttaaaagcgaactgcaaccaccatatgtccaaatccaagtacgaattttaccgcgaccttgcagtaatcattgggattaataactactcaaatggtattccagagttagaaacgcctgtcgctgacgctgaaaaattcgccaaaattctccaagataattatcaatatgaggcgcagatattactaaacgaaaaagcgacattgaaagagttaaattctctactggaggacttcaagcaaaaaaaattacgcctaccagataaaactgtacagatagaagaaaatgaccgcttaatactttactttgctggacacggaatcgtcctcagagatgggctagaaaatacggataatctggaaggatatcttgttccccaagatgctagaggagatatcttgttgcaaaacaatattcttctacctatgcaagacttgcatgatgcactagcacaattaccttgccgtcatttgctaattatacttgactgctgttttgctggggcatttcggtcgagtttgtatagagaaattgtacctgcacgaaaagtttataaacaacggtacgatcgctttattagagatccagcatggcaagcgatcgcatctgcggctcatgaccaaaaagctattgaccatctaggttgttttggacagagaggaagcaaaggcaaacactctccttttgcaaaagctttgtttgacggtttgctgggtgctgctgacacaactctaagagaaggtgatggtattatcacagcaacagaactttactgttatttacgcgatcgcgttgaggaactaactgataaatatgacaaacgccaaactccaggtttatttcctctgaaaaagcatgataaaggcgagtatatcttcttgcttcccaacttcgaccaaaacaatttagaagatgcaccagcactcaagcaagaaaacaatccttatcggggtttaaagagctatgaagaagaacattctctcctgttttttggtagagatgaacttgtcaaagaactatctacccatgtttctcaaaccaataacccactcaccgtagttttgggtatttctggttctggaaagtcgagcttagtgaaagcaggactcattccttatttacgaaaacatcataaccaagaatggtacatcataccaactattcgcccaggagataattctttcacttctctggcagaggcacttgtagaaaagtctgaaacagatggaaattacttaaacaaaattaaatctctaaatcagacattaaaacaaataccacaggattttattaagataatacaagaattactactaatacctgaaaaagtaaaaattttattagttatagaccaatttgaagaactaatcacagtttgtaatccacaagaaaaagaacaatttttaaatttccttagcagtattttagaagctcatcctcagcaaatttccattgtattgactctgcgttctgactttgaacctcggtttttagattctgctctgaaagcatattggacacaatctcgttttcctatacgagctatgagatccgatgaattacggcaggcaattgaacgacctgctaacgaaaaaatgctcgattttgacccaccaaatttagttgatcagttgattgacgaagtggggcaaatgccaggagcattgtcgctattatcttttacattgagtgaactatatattaaagccataaatcgagaaagcagaactttaagtaagactgattacgatacattaggcggagttgcaggttcattaacacaaagagcaactcaggaataccaaacattagtgaaacttgatccagcttatgaacataccgtccgccaactcatgctgagaatggtagctattgaaggtaatgaattagcacgacgacgagtaccaatgtcagaactggagtatgagagtgtagaaaaaaatcaaagggtgtcgcgggcgattgctcagttttcggcggcacgtctaattgttgaaggtaaagaaactggtgacgaaccttatgttgaaccagcacacgatgccttagtaagcgggtggaacaaactacaggaatggaaaaatgatgagcaaggaagtttagttttgcgtcaacgcttaacaccatctgctaacgattggctaaaagatgggcgcaaatctgattatctatggattcgtgatcctcgcctcgctatcctggaaaaagtcctggaattgccatctgaagaaaactggctcaatcagctagaaacagaatttgtgaacaccagtattcagaaaagaaaggatgaacttgaagaaactaaagaacaactccgcatttctgaagagcgtcgtatcgaagcagaaaagcaaactgcgatcgcgcttgctagaaattctgaagccttactatcttctaatcaacaattagaagcactgattgcagcagtaaaggcaggaagaaaattacaaaatctactagcagaagaagctatttcttcacaaagtttgttattcaagcaaactgtgttattcaagcaaactgtgattgccctagaacgagcagtttatggagtgagagagcgtaaccgtttggaaggacatagcgggccagttcaaagcgtctgttttagtcctgatggcaagatgattgccactgctagttgggataatacagttaagctatggagtagggaaggtaaagaactaaaaactctgaaaggacattatgatggtgttttaagtgtctgtttcagtcctgatggtcaaactgttgcctcaactggttgggataacacgatcagaatatggaatctggagggacaggagcttacacagcaccctctcggatttggccatacagatcaggtatggtgtgtttgttttagtcctgacggagaaatgatcgcctctgccagtcatgacaggagagttaaactgtggaataaagatggacagtttctcagaaacctttgtgaatcaagtaccaccgagcatgaactaaccgtcagtagtgtttgctttagtcctgatggaaaaataattgctactgcaagttatgataacacagttaaactttggaatcttgacggtactttaattaaaagttttacacatagcggggcagtttatgatatcagtttcagccccgatggtaacactattgtttctgctagtgcagacaagacagtaaaaatttggagtttaaacggcaaaaaacaaactcttaaaggacatgaaggtgaatttacgagtgttaggtttagccctgatggaaaaataattgcctctggtagtaaagataattctatcaagctttggagtaaagacggtcaggaacttacaactctcagagggcatactgcggaaattactagcattaattttagccctgatggtaatatcattgcttctgctagtgaagattcaactgtcaagatttggaacaaagacggtcaacaaatcactatccttccagaatatggtgaaggggttactcaagtctgttttagtccagacggcaaaacaattgttggtaatgcgaaaaatacactcaaactctggaatcttgatactcaagagagcaaaatgttttctgatattactggtgcaaacaatggtatcagtttcagttttagcccagatggtaacgcgatcgcggtctgtggaggttttgacaaaatggttaaactttgcaatcttgaaggccaagaaattaagaactctaacgattattatcacgcaataagggctatccggttcagccctgatggtaaaactattgcttttaataataataaaaagattgacctttggaattgggagaatcaagagataaaaaccctgtcagggcatacaggcaaggtttgtagtctatgtttcagcccagacagtaagataattgtttctggtagtgatggttctgataagacaattaaactgtggaacctaagcagtggtgaagttatcatccttgaaggtcatagtaatagtgtaaatcaagtctgtttcagtccagatggcgaaataattgcttctgccagttctgataacacagtaaaactttggaatcttaatggacaagaactaaaaactctccgaggtcatagctatcaggtatttgatgtaacttttagccttgatgggaaaatgattgcttctgctgattgggatggcacaatcaaactttggaatcgtgatggtcaactgctcacaactttagaaaaacgaagtgaaaaactatccagtattagcttcagcccggatgttcaaatcctggctgctgccagtaataaaggagtaattttatggaacttcaatttagatgacttagtagcacgtggttgtaatttgttacatgaatacttaatgaataacactaatgttcaagaagagcaaaatctctgcaatgacagatgaataagcagtaagcaatatacgcaaaatagttcacagaaaataactgacattctcaaaactaaattagttattaacccaagttgctagttatgccgaagagcgatcgcagtgggttccattgccgcttcagaatggatagttaacatatactctcaaggcgactgtatttactgcttccctgcgtggcgtagccattcctgttacttaatgtttccggttttagtcgatactattaccatagcagcaatagagggattactgattaagcttgctctggagagcgatcgcaagttattttggaacaaatagatgccaaatccttacagggcttgctttcggcaaattatatgacttttttatttatcaatatgaggcatttctgaaaaattgtacaactttattttttgatatcaaataaaattgaacgtaaatacaaggcttataaactttcaaattatataagttttttatgtttttacaataatttggtagaataaccagataatttctgaatgtgatgataatattatcacaatcaggaatatttttttgggcgatcgcctacggtgctgatgcgtccacctcatcacttgtctataaataaaaaacaagcaggacatatactatgagccaaaaaaccattgattccaaaaatctgaccatagaaaaaatttttgaagatttttatattattcctagttatcaaagagaatatatttggaaagaaaaacaagtattagagttattaaatgatgtatatagtgaatttcctggctctttaaatatagaatctgatgaatattttctaggcagtattgtaatttgtcctagttctgaagatacagacaatgtgtatcaggtaattgatgggcaacaaagattaacaacttcttatatcttcttttgtgctgtcaaaaattatataaataagttgccagaacatcaaaagtttgatgcgattaagaaattaatttattcagagtatacaaatgcacaaggtcaagaccaatcacaatacaggataaatcctcaatatccagacagtaaaaatattttggaagaatttgctaaagatgaaatcaatatagaagagatagaaaataaaaaaaataataaaactgaatctacaattaatttgatttcagcttaccaaacaatagaagattttattaaggataagttcaaagatgatgaaaaccagatcaaaaggttttatgcacatttcatcaaaaaagtaaagttagttagagttgaaactacagatattaaccacgccttaagagtttttgaaaccatcaataatagaggcgttggcttggattctatggatttacttaaaaatcttttgtttaaacaagttgaaaaagaagatttttcaaaaattagtaattcttggaaagaaataaaaaatgaattagattcagtaaaggaaaagcctatggattttctacgatactttattctaactcaatatgatgttgaaagagataatgtccaaactaaagaataccaatggttactggaaaataatactacttgtaaatatgaagaaaaaccatttgagtttgtcgaggacttactgaaggctgcaaaggcttataaatcattactagaaagaaaaaatccttctgataattcagataacccgcatttagctaatattaagtatttaagccccaatcttaaacaacatctatatatactgttagcagcaagggatatgtcaatggaaatattttctcaattgtgtctacatattgaaaactttatttttgtttatagttttcctaataattcaatcagtgaattagaaaaaatatttattaattggggtcaagagattcgtaaaatagtacaaaatacagacaaagaagagcaattatctaaattaaaagaatttttatataacaatctaggtgtacgtaaagaaaatctcaagaaatcttttgagaaaaagtttaaggaagcaagtcaattagactttaattcaagaggaacaaataaaaagccaacatcaaatgctaataaaaaaacaaagtatatattagcaaaaatttctcagtatgtacaacttatagcttatagcgacaatgatgagtgtaaaaattttacaacttttactcagagttcaatagaaattgagcatattttaccacaagatttaaattctgaacctgttaaagcttttgataaaccagatgaagttgaatcatatatatacaaattaggcaatttagctttgctagaacaaactctcaatgcttctattcaaaatagtccatttgaagttaagaaagaagcttatcaacaatcgaattttcttttaacacaatgtatatctgaaaagcccactattggaactaatactgcaattaatagggctgtggagaaattaataagttttaatgaatggaattcacaatcaattgataaaagacaagaaatgctcacagaattagcattgaaaatatggtacgaggaagtatctttcgaagaagtaccttttgaggaaagtctggatgctagggaaatacaggaactattgcggtttggtggtgaaagagctatttaatttgatagcatctgatatcctttctacacctaaagtgccagttgcgtaagtcctgaacatatatagatagaaagtgagataagaacaggtaagagtaagctattcaaacacaacgccaattttcgatttgtaagttaggtattctttgaaattctcgaacattagatgtcaccacaatatgattattgatgactgcggtagctgcgatgagtacatcatacgcaccaataggtgaaccagctagtttgagaaagcttctgatttcggctgcttgttctgctgctttcgagtcaaaaggtaaaattgtgattgagtttaataatgtttcaaaaattgattggattttaacagcgcgttgtgggttaatagctaatccatatttcacctccataactgttagagatgacacaaaaatctccgcaggggaaattaattttattcgcttgagggtgttttcttctcctttgacaaaatcactaatgacgcaagtatccaatagataacccatacataattaaagttctatttcgttaggaggtatcagttcatctcgatatgattcaaagataatactttcgtttacaccttgatattgtattagggtttctggccattggctgggtttagtttctaggaatgtcacgaaaacaatgctttcagtaataccttgcggtgtttcagctagttcaattttgccgtttttataaattccttgaatggtttttaacatagagcttacctcctacattaagtttaacctatttattctccttcttcagtcatgctgggtgggaatcgaatgtctgagtcttcaatataaattttacctgagatgagacgatttatcaggcgatcgcgtgtttgtttaaggtgtaattttactaattggatataatcaatttgattgttcaatttacttgcaaatttacaaaagtttactgtgt

SEQ ID NO: 146 - DNA, 37 bp, synthetic construct
  misc_feature 1..37: note = Synthetic
  source 1..37: mol_type = other DNA
actgctcaacgtctaacgacatctaatgttaaagcac

SEQ ID NO: 147 - DNA, 37 bp, synthetic construct; identical to SEQ ID NO: 146
  misc_feature 1..37: note = Synthetic
  source 1..37: mol_type = other DNA

SEQ ID NO: 148 - DNA, 37 bp, synthetic construct; identical to SEQ ID NO: 146
  misc_feature 1..37: note = Synthetic
  source 1..37: mol_type = other DNA

SEQ ID NO: 149 - DNA, 37 bp, synthetic construct; identical to SEQ ID NO: 146
  misc_feature 1..37: note = Synthetic
  source 1..37: mol_type = other DNA

SEQ ID NO: 150 - DNA, 60 bp, synthetic construct
  misc_feature 1..60: note = Synthetic
  source 1..60: mol_type = other DNA
atgccgtcgttacttcctaaagccagcattgtaccatcggggctaaagctaacactattt

SEQ ID NO: 151 - DNA, 60 bp, synthetic construct; identical to SEQ ID NO: 150
  misc_feature 1..60: note = Synthetic
  source 1..60: mol_type = other DNA

SEQ ID NO: 152 - DNA, 60 bp, synthetic construct; identical to SEQ ID NO: 150
  misc_feature 1..60: note = Synthetic
  source 1..60: mol_type = other DNA

SEQ ID NO: 153 - DNA, 60 bp, synthetic construct; identical to SEQ ID NO: 150
  misc_feature 1..60: note = Synthetic
  source 1..60: mol_type = other DNA

SEQ ID NO: 154 - DNA, 39833 bp, Nostoc sp.
  source 1..39833: mol_type = other DNA
ttataaaaatacctagtggccaaaggagcaaacctgctccttttttctttggtaaagtttgttgatgattaacggttgactgtggactatggactattgactatgaactgttgactatactggaatttaattctcttgaagaaagggtggtgtgagcaatgtgtggcatcgttgggtatattggcactcaagcagcgacagaaatcttattatctgggctggaaaagttagagtatcggggttatgactcagcaggtgtagctacgctttgggaaggtgaggttcactgtgtccgagccaagggcaaactgcataacctccgttctaaactagagcaactagtaacctcctctcaaatcggaattggtcatacacgctgggcgactcatggtaaaccagaggagcataacgcccatcctcatttagatacagcaaggcgcatagctgttgtccaaaatgggattattgaaaattaccgcgagttacgggaagaactgaagcagaaaggatatgagtttcgttctgaaaccgatacagaagttattcctcacctcatagccgaattgtcaaaaaatgcctcctcttttctagaagcagtacgccaagctgttagccatctgcatggagcatttgcgatcgccgtcatttcggctgattaccccgacgaattgattgttgtccgccagcaagcgccgttagtgataggatttggtcaaggtgagtttttctgtgcttcagatacgccagccatagtttcccatacccgcgccgtcttacccctggagaatggcgaaatcgcccgtcttacacccttgggagtagagatttataactttgctggcgacaggctcaaaaaacaaccccggatgctcaacttgagtcccacgatggtagaaaagcagggattcaagcactttatgctcaaggagatttatgagcaaccaggagttgttagagcaagtttagacgcatactttaatacagaggttaattctggtaaatcattccaatcaccagttaagttaggtttacccgaacagttctacgcagacttagaacaaattcatattgttgcttgcggtacaagttggcacgccgctttagtagggaagtatttacttgaacaattagcaggaatctctactcaggtacattatgcttctgagtatcgttatgcaccatcaccgctaacagcgaatacattaattattggcgttacgcagtctggggaaacagctgataccttagcagccttagcaatggaaaaagaacgccgtcaaggtaaagaagcaaaatatcaagcgcaattcttgggtattaccaatcgcccagagagtagccttggtcatcttgtaccccatattatcaacaccttggcaggaattgaaatcggtgtggcagcaactaaaacctttgtcgcccaactgatggcgttttatgccctagccttagatttagcctatcatcgtcaaactgtagcgccggataaattagcagatattattcaaggtttgcgccagatacccaaggaaatagaagaaaccttagaacgccaagaaaaattaacggaacatttagctcatgaatttgcagagactcaagacttcatctttttgggtagagggattaatttccccattgcattggaaggggctttgaaattaaaagaaattagctatattcacgctgaaggttatccggctggggaaatgaaacatggccccattgctttattagatgcaaaagtgccagtagtggcgatcgctttccctggtactgtgtatgagaaagtcatttccaactctcaggaagccaaagccagagattcccgcttaattggcgtaacgccagtcagcgatggcgaagccggggaaatctttaatgatttacttcccgtttcccctgtggatgaattactttcacccatcctcacagtagtacctttgcaactattggcttaccacatcgccgcccgtcgcggtttggatgtcgatcagccaaggaatcttgctaagagcgttactgttgagtagtgttgaatcgagaaatattgaggttgtggaaacataataaagttgtacaataaataataaagttgtacaatgcctaataaagttatacaatttctcctatgggtgagtataattccatctgtaggagattgtctttatggctagaaccaagcaagagtggacgcaagctaagtttgagcgctacatgaaggaaggtcgaggtcagggtagtggaaaaaattatcaaccgtggataaaaattcaagattttccgtcgaagggtagggtatctagaccacccggttggaaaacaaaccgagagcatcatctgttctccgatcatgagaaacggttattttatttgtttgagtggtcggacagcattattgatataagggaacaattccctttaattgacttagacttagcgatgaacattgctaccgaaatggcgattgagtatcccaaagatgttaataataatactccctatgttttaactacagactttatgttatctgtgaagcaaggaaagcagatagttgaaaaagctcgcactttcaaattagttaaggatttaggaattaaatctgttgctgaaaaatttgagttagaaaagcgttattacacagcaaaagggattgattggggtattattacggaaaaagaaattcctacgcttttagtaaaaaatgttgagtggattcattctagttataagttagaagcagccgcagaaatcaatgttgatgagttgaataacatcgcaaatattttaaagtcaaaattgcaagaaagcgattctactattaataaaattacaaattgcttagataaagagatgaatctagaaataggtacgtcactctacatttttaagcatctccttgccaataagaaaataatcatggatatgcaaacaaatgcaatatctagttctatttcagcgcgagaaattcaaaaaatcattttctagaaatttatattggttgttcccatgaataataatttgtttgttaatgacttaattgagtggattgacgaatcaggaaacaactttgtagagagaattatttggattgatgaagcctatatcattgcctttacgatagatataaatatcaaaactggatttccagtgtctaaaagagtatcagatatccaagaagcaatttatgaaggtcgtgcattgaagttgaggacagacccttgggcaagaatcgttagagatgaagacttatctgctaaagaaaaagaaattagagataagtattgggatattatttcatctatagtaattcaagaaccatctatatactatcgagataaacgaggctcgctcattaaacaagttatagaaaaatataataataataagagcgaaggaaaattaattgaaagaagcgtttatcagattattaggagatactggcaaagaggtaaagataaaaactctctcttacctgattatgcaaattccggtggcaaaggcaaagtaagagcatctagagaaaaaaagagaggaagaccaagaaaatatgctcatgagccagacatcggtgtaggtataaatataaccgatgaagataagaaaatatttagattagcagttactaagttttatcacaatcaaaaagaaaactttttgacaactgcttatgatttaatgattaaaaactattattcagaggaaactatttacgatgagaatggcgttaaaaaacatatattaattcccccagataaacgaccaacattaacccagtttaaatattggtatgacgttgaacaaggagacattagaaaaaaaataatttctcgtaggggagctaaaaaatatgctctggaacatagagcaattacaggaaactcaacaatggaaactattgggcctggttctagataccaaatagatgcgacgatcgcagacgtgtacctagtttctgcgtacaatcgcaactggattgttggtagacctgttatctatgtagtcatcgatgtttttagccggatgataacaggagtttatgttgggtttgaaggcccttcttggataggagcaatgatggctttagcaaatgcagccagtgataaagtagcattttgcaaagaatacggtatcgagattacagaagatgaatgggcttgtcatcatattcctgatgcaattttaggcgatcgcggcgagttagcagggatggcagtagaaacactaattcccaatcttggtattcgtatcgaaaatgctgcaccctaccgagcagattggaagggtttagtagaaagacattttggcattatccacggtcatatcaaaccatttgtgccaggttacatagacaaggattttagggaaagaggagcaagagattatcgacttgatagcaagcttgatatagagcagtttactgaaattattatcaagatcatcctttaccacaacaatgaacattacttagataactatgaaagagatgaggcaatgatagctgatgatgttccccccatacctagagaattatggcagtggggaattgcaaatcgttcaggtagacttaggactattcctgaagatattgttaagctgaacttaatgccaacagaaaacgcaacgattaccgaacgtggcattaaatttaaaggaatgtactacacctgtcaaaaagcaaaaaacgaattttggtttgagaaagctagaagtaattctctttctaggttagagaaaaaattagaaatttcatatgacattagaaaacctgattatatatatcttcgctctcctgatggtagaaactttgagaaatgttttcttttagaatcagaatcaaaatattttaataaaaatttacatgaaattgaatatttatttgcttttgaagagttacaaaaacaaaaaaataaaggtttaaaacaacaacagaaagtagacttaatcgcagaaattgaaagtgtcgtgaataaagcaaaaaaaatgaccgaggaaatgaaagatgataaactgagcaatagaaaaagaaccgcaggtattcgagataatagaagtgctgaaaaatctaaacgtcgaaaaattgaaggctttgagctagaaaagagtgatcatgaaaatactagtaatactgtggatattgaaagtcaaaaagtagagcagccacaatcattgcaacctaactatcttgatattcttcgtcagaagcgagaggaacgaaagcgtgaacaagataaatgattggaaatgggttgaaattccaaatggtaaatctgctgctgtagctaaatataatgaccataaattaccagagtacaataataaccctttaattcaagcattacctccaattctttctggagaagaatttattgaaaaagcaataatactccccagttacgcacctgaagagagggaaatggatgcacaccgtcgatttcactgcgttgaacgattatctagatactttcaacctttaaataaaacggttaatttacagcaggttatgtgtgcattattaatgcagggctacatagcacgtaatatttccaaacctgaatatgcacgccgatcccgacaaatttatgaagcgataaaagcgggagatggtagaaatttagatgtttatgtaaatgttcccacatccacatccgcatctggtttaacattaattggcccatcaggcatgggtaaatctactaattttattaatattcttaatttatatcctcaagtaattctacatccagaatacagtacttaccaaattgtttggttaaaagtcgattgtcctcatgctggttctctcaaaggcttatgtacagatatatttcttggtatagataggttactgggaaccaactattttaaaaaatttggtgcatcacgaaattctgaagattatatgctggctcaagttgcccaaatggctcatactcaccatttgggagtcttagtgattgatgagatgcaaaatttagtaacagcaagaagaagttgctctgatatgctgaatttcttagtaaaaatggataacatcattggagttcctgttatccgtattggtaccaatgaagcttttccaattcttcaaggtaattttaggaatgctagaaggggaactggtgaaggaagcgttatttgggacaggatgagaaatgatgatgaatggtacttttttatggagaccatgtgggagtatcaatggacaaaaatatctactgatttttctgatgagtttaatgatgttttttatgatgaaagtcaaggaattattgatattgccattaaactttataaaatggttcaatggagagctatttcactgggtggaaaagaggcaataaacgccaatttaattaaacaatctgttaaagacggattatttttagtaaaaccaatgctaaatgctatccgttctggagacaaggaatggatgattaagtataaagatatagctcctattgatactacagaatattacaataattgtttatctaatttagaaactaaagatttaaaagaaattagtagattagcgaaaaaacagcaagctgagaatggacatttatcagcgacacaacgtcatataattcttaaacttttagaattagatgtagaaccgcaattagccaaagaatgtgcagtacaagtaattaattctggcgaagaagatgctgatattcctattttggtaaaacaagcttatgctctagctttgggtgggcaagttcaggaggctactgtaaagaaagtgagaacgcacacactaaaagcaaagccaaaatatcaaataaacgatattcgacaaattgcggaaaaagcaaagaaaaatcaaactagtgcatatgaaggtttgaaatcgacaggaattatcaaagatccagtccaggattttatcactatcacctaattatatgcttagtttctttccaacactatatcctgatgaactgttatatagtgctttggctagatatcatatacggagtggcaataaaacctttaagcaaactgatttagaattatttggttacagttctcagcaactatgtaaagttactttaaccaataatttgaattatttagttaaaaacttgtctttattttctcagttaacagttagtgatttactacaaaatcataccctataccctttttatgcaagtttcttaataccccagcaagcttggcaattacaagactctatgaggaaaaagctaggtggctctattttagaggttgcaaaagtagctaatcactctgctgacaactcaacaaagtttttaaagttttgtcctatatgtctagaacaagatacacaggaatatggtgaaccatactggcatcgaattcaccaaatacctggtatattagtttgtgcaacccatagagttgttttgcatgatagctctgtagctgttgattctaagggtatccattattatgcagcgagtccagagaattgtctcaccaatcaaaatcaagtgaaatgcgctgataacactgtagaaaagttattaatcttagctcatgatatttggaatataagtactattaatattccttttaaaggtttaacttggctccgcaatcaatatcagtcctatttaattaatcaaaagtttatgaccctcctacctggggagaaatttagatttaacgaaaaatctttttcaaattctatctgtgatttttatggacaagagtttctagaaataattaatccaaatttaatcaggaatccagacaaatatttttctggttatttactagcttgtgatttgaatccagtaatcgaccggattacacatatattgataataaaatttttagctaattctgtagaaatattttttacataacatacttgttagagtacttaatatataaaaatattttttagcaaaaaatatattaatttacttgaaattgcataccgattaaagatgtagcaatagagtatggtagagaaacaacataaattaagctcagaagtagcgatttttcagagaaatgaaataaatgggtgataattttcacgtatcaactcagagccatgctacagaggttttaaatcctcagttaatctacgtggacttaagctttcgtgtaattggtcagactttacccatagaccacggctatgctttgtatgctgcactgactcacttacaggacaaacttcattctctagatgacctcagcattcaaactattcctggcattcctgatggcaacgattcacttcatcttaataaccactctaggcttcggattcggctaccagtagataaaatacctttagtttatccgtttgcaggtaaatcactaacaattggcaggcataagattcatttagaaattccccaaatgtatcttcttcaagcggtggagaaattgcgatcgcgtattgtggttatcaaaggctacgaagaaccaaagggttttttagcagcagcgcagcgtcaactggaaaaactgggtgtccagggaatagccagtatacctaccaaagctgatggcaaaccagaacgcagaagtatcaaaattaagaaatttacagttgtgggttttggattggaggtaacgaatttaaatgatgaagattcaataaccttgcaaaaatacggtgttggcgggaagcaaaaaatgggttgtggagtttttgtaccagttaacgaaaaacgatagcagttgtttaaaggcagatgataaatacaacagctaactccaaaattcagttaaatctgagcgactctagcactactttgttacatcgcgcagggatagcaggattttggatgacgctaaaacagttggaagaaatatatccgaatcctgctcaacgtactggtaatttaacctgggtactaacaccccatagcatcagtcttaactgggaagggcaggatttcgcagctttagactggttgctaaagcaatcttttcaaattagtgatgagggtttaattttcctgacaggattaaatccaaaagcaattcatattgaaagacaaataataatccatcaaggtattacaggaacttttttacagcacaataaatttttcaaattttcagacaaaaaattaaagtccataattgttgacggcagacaatttgtgactgagtacaaaagtgctatgtcttatgctcatcagcactttgctaaaaagttgtgtgatgaatctggccaattgttacaagagcctattggcatagtaggttggctgtatccaggagcagtagttcgtcattctgcttttccaaaacaaaccaaatttgaagagaagccagagtatgcactagcgttattgtttgtgcctgtagcgtgccactattttattttgcgatcgcacaccaaaccccaatctacaaactatattctggttgtccccgaagtaaataatttagagttttacgcccagcattgctggaatctgagtaatttgagttacagagattttcatgtatctagcttaagagacgctggattaaaattcctgactaatgaagcagcaatacagataaaacaaaattgtgttaagcgatgtcaggttttttcttttgggacgctaatttggtcagaacagcaaaaagttcgtacagaaacagcaacattagagctaacggaaaaagtgagcttctactataagtttagtcggagttgtttctccaattaccgaatcgttgactatgaaaatcaacattttatccttacaagtctagttcaaggaataattgctaataatttaggtttagggttgccttggtggaatgattttggcaacatacttacatctagtaatttgtttaatcaaatagctgatgaaaatcaaggaatttatatgatgattcaagagtctgaatgggacatagaatcgcaaaagctgtttatcaaagcttgtcatgaagcattaaaggtaatatacgccaaaatttattcccgaaccaaggaaaatgaatatgctcaaattgaacgagaaaatacgaaaattatatctcaactaggacgctgtactaatgctgaaaattttagaaaatttattgcggaattctggggcaaagcagggcaactttcaattttagaagaacactgggaagaattactaccaataacaacaggtgttaggcattggaaaatgtccagggatttaacttttattgcaatcgctagctatcccaaaagtaagaacatcaagcctgaatcatcagaaatatctcagacaagtagtgaataattagaattttttctattttcttaaatccatgattttaaatttttaggtaaatactcaatgtctcatctgtttggtaatattttaactatttatggtactgctgctaataatcgaggtgaaaatgaaggtaatattactaccctacaaaaaataaactggaagggcgaagttcacaccagtgtctcagcagaggctattcgttgggcagtgcgctactactggcaaaataatggttatgaagtaaatcgacgttgggatgaaaatgcacaaccactggctgatcatatctggcaagacacgaacttcaatagtgttcggttcattgatgatgatgttttaggattcatgcaggcagaggcagcaagagttgaagcaggtgagcaatctggaggtgaagtccaggaagcatccgcaggagaaattcaaaatgtgtctcaagatgaagagacagcaagcccaaaaggcaagggaaaaaaaacttcgcaacgcaaaggacgagaaagatcacaagggagagttaccgctaaaagaggtgtactagaggttactcgtgcagtatcattgattccctatgggggtaacattacttttaatgcagtcagtggaacaaaaggacgaacttctctttatggtacagaagttcatgctactcgttatcagtatggttttgcaatgacacccaatagtctccaagacaaatctcggatcaatgcagttctagatggcttaatttcaattggagaagtaggaggaaatcatgcccggtttttatatgatttttccccagatagtattatattacgctggacacatgatttctctcctcggtttctctattgctttgaacaagatgaatggggaactatatcagttccagatttagtcagacgggtagaagctgaagatattgacccaaaagaattatggattggaggagcaattgctagagatttaggaaatttgggtgcaaatgtgtttccaggtgtgaagaaagtagtagaagaattattaaaggtcattacacgagacttacaattgccaccaaggagttcataatgtgacgactattgctttgaaagtagaagtccctatcgcttgttttcgccagtctcgtgctagggagtatgtagaaacctattcggtaccaccaccatcaacagtatatggaatgttactgtctcttgtaggggaagaaaacagatatactcactgtggagtcaagctggcgatcacacttgtatctgaaccagcaaaatcaactgtaattcgtacctttcatcgattgaaaacgaagaatattcatgatcctaaaaataataaacctgattaccaggagttactgactaatattgagtttgtagtttgggtagaccctggggtagataaagctagaccaaatttagtgcaacgtttagaagaggcatttactaacccagcttctattaatagatttggtggactatgtttaggtgaaagtcgggatttagtaaatgatattaccctcttaccaaaaaactactatgcagaatcaatgcggtggttaatcaaggatgaacacgggttgctaactttaccttattgggtagaccacgtaggttcgcaaggaacgcgatggctgcgttacgagcttcaggaatgccaagtattgcaaccgcctgaattatcttggacttcagttcaaagtgattagggggttattattttattttgcaagtacctttgcttgagaagtctaaataccatgagcaatagccttgtcttcttatttgacaagccttttagggattttatacgcatccaagatgcttgcgatttcctggaacaccgtcaacacaagagttgagggctttaacaactttccttgtgctatgaatagctattaatttttgcaactggactaatcttcagtgatagatgcttgtaaaattgaactagagcttaggcgagtcaacaagtttggcgatcgccgtgcttcaacattagatgccattaggcgttgagcaggcatcgtgcggggtgagaattgggtttacgaaaatgtgcttcaacattagatgccattaggcgttgagcaggtagttagtaataattaattctttgcccttttttacttgtgcttcaacattagatgccattaggcgttgagcagagtctagatattgcaacattaacattctgagggttctgtgcttcaacattagatgccattaggcgttgagcaggaagattttaattatcgccatgtcggggaaatagaagtgcttcaacattatcagatgctgttaggtgttgagcaaaaaaataggctcaagtatttgcgcttaatataaatacgttctcactgagtacaaaactagtcatcttgagtctcgtctttccgagaaattttagcgataattttttcccattcctcaatttgcttctgtatttgtaatttgcgatcgctcaactctttattatcattaacagacaaatcctgaccactcaatcgctcacggtaaagagcaatcagttcggttagggcttttttattgcgtgcttatcctcctgagtcagagaactcacattgactggaatcagctttctgcctattctctccacaaattcagaccgacttaaatccatgctgtcggcgatcgcatctaatccatcaatcccggtaggagttagggctaggttaactcgtttcttcacctcatcgtacagttctggtacgtctttttgacctttttgccctttcttacccattgccgtctactttttacattcctcccaatcatagtaaacacattcaacactttaagctaaacattaaaactgtttctaatctttaggtattgtgtaatgcctaatttagctagataatttaggtattgtgtaatgcctgaataggcatcttgtaggaatatgagtaactaatttcaccgtttggcttatcaacatctaaacggcttaattttcatgggcaatccttaattgctgcttatctaattcaaattaataaaaatctgctaaataattcggtcatttttcacaactatatggtgagttttttccctaaaccttatccagaggaaattttatatagtgtcattgctcgttatcacattagaagtggcaataccagtccaaaaattacacttcaagagttatttaattcacaaactactgtagcaacagtagatttaccatcgaacctgaataatttaattcaaaatctacaatttatttcaaattaccaagttgaggatttgatatataaacatactctctaccctttatatagccctttcttgtctgcaaacaggtctagtcaggttttggaatctatgaaaggagattacggaggagatattcatacaagagccggaattatggcaagctcaattactatgccaaagtattttcggttttgtccaacttgcctagaagaagacctaaaaacttatggcgaaccttactggcatcgcatccatcaaataccaggggttttagtttgtccatttcatgctgaagttttgcaaaatagtctagttcccttacacggttttaataagcatgaatatcatgcagctagtacagacaactgttctattactaaagaatcaactttttttagcactgacatactgaaaaaactactgttattagccaaagacttttggtggttactcaatagtgaaataccttgccaagaaccacagtggtttcgcaaacaatataccaatctgatgattgagcagcgtcttgcaactgcaacaggtcgaatttatcagaaaagactactggataattttttgtttttttatggtcgagaaatgctcagtgccgttgattcaatggtaaatcataatgactcaaacaattgggttactagcattgtcaggaagcataggaaatctttccatcctcttaggcatttactgataatcagttttttgaaaacgtcagtagaggaatttttcaagcaagatactgaatacaagccttttggcgaatctccttggttgtgtctcaatgctgccgcagaacattatctacaaccagtgattaccagtttagacattactttatgctgcgatacaaaaaagcctgtcggtactttttcttgttcttgtggaatgatttattgccggactgggcctgatgaaacagatgaagacaaacttcgcattggtaaaattaaaacatttggtcaactatgggagcaaaagctgaaagagttagtagaagttgaaaagttgggtttgcgggagacagccagaagattaaatgttgatgctagaactatcaaacgttatgtatctcgtctgagactgacaacttattggcagactagaaaggaaaatgactctgtaggcttacaggaattaccagaaatagatcccaattttgcaactgaactcaaattgaaacacaggcaaaattggatggttttacaagtacagaaccctgaagcttcaaagacaactctgagaaaactagcaccagccacctatatttggctatacaggaatgacagagaatggctcaatcaaaactcacccgctttacaagttgctgttccttccgttgtgagagttgattggcatgagcgagatcagcaaattctcactcaggttcaagatgcagtgcgatcgctacttaacgctgagataccagagaaaatttctattagtagggtagggaaaactatcggcttacttgcattactcgaaaaacatctcgaccaaatgcctctaacaaaggcttacttagaatcagtagttgaaacggtagaagaatttcaaatgcgccggatcaagtgggcaatcaagttgcttgatgaatgtggagaagaaattatgcgctggaaggtagtcagagttgctgctttgcgagaggattgctctgaaagggtcagtgcatttctggaaagtgaacttgagaaagcatacaagaaagagaggtgattcaattcacctctccaagtgatgggataaatgctttgtgtgttaggccgcgtcggctaccagtaagccattcatagcgatgatgatgatttgtgctgctaaaggagtatcacaacgtggtctatcgtcgctattacagggttgtgctacccatttaccctccagattttggtagaaagtgccgagaagttgataaccattccaaacacggtaaagctccccaaatacttcagataccgaatcaatctcaatttctggtgctactgggtcagcaagctggtcaatatattcctcaaactctaattgagctaaggcttggttatcaaattcatcttgtacaatcatcatgagtaacctcattaatggggttgaacaaaaagcgatcgcatttctcttggcggagggcgatcgcctttttgatatcatcccacaatatggctactttagtagctaaataataacaaatgtatctaaagctttaatttgtcacttcgactgtgcttaaaaaattgcttaccgatatttccaatgcagtacatatagcttctaatacttttagggaaacactttcagactcaccatattctaattttttcaagttttgatgggaacattcaccacctctagcagcaatttcatcagctagtttctgacgtgattttttaccacgcaatcgctttaaaatgattcctctgtcttgattccagacgacagatacaacatctgcaacataaatatacgtttttgtttctttttcacccttattgcccatatagtagctacaacagtaaacaatacataaattttgagctactatagtttacaaattattaggatttaggtatctcaaaacgaagttgcgcccggtcttcaggatgagagcgttatcatccaagaagatacacaatgcaggttttgctaagagaatgtgtcatagccaatattatgagtaatcgcggattccttaaagaggtagcaaacaaatatatattaggctgattatgttaatttgctaaaaatgttcagttcttaaaaataactgaacgtttttatctaagtataagtacgagcttattttattagtagattattaaattaataaattaataaattaaataattacttgggctatgacaccgtataaacacggttttaaaatcaaaataaggatttaaagaagaaatatctataaaagtatttgcggcaaaatgtggcggttaagagtatatgcaaatacaataacttgaatatgttttcctactattatttgtcataagtgtatcctttatggcgcaaaccatagtaatacccacgggcattcctatcataacccttcgcctccaggtacttgtattggctttgggggaagtttcaacatggtggcgaactcaatatttttctgctgctggactgagatttttagaaagaatctacccacgtacagcttttgccgcagctatcaatgctgctagtacggcagctcgtcctgttcacgacgctagtactggcagtaaccaaatctaccatctgtttcgccttcctatttccatagagcgggaagttcaactattactaacaaaggcacaaggagcaagtttggcgttagaagtcaaaccagcacttggggataaagacaagttgatgacaatgttagatgcactaactacagaaaaatctaaggtagcggttggtgcattacgtttaggaagcagtgcagaggcataccaactagcaacctacaaacggatggcaggagcatatctaagaggttttcaaacaggcgatcgcgtctttccctacatggaggcagaccaggagtgattgttatgacatcgggtgacgcagtgcaaaagtcacctcgttacagtattgcgattgtctgtaagggaactgcaatggtgaacgagactcgccatttaattcaacagtggcatcctacagaaaatgtggatacatttgttaaacgcgttcaagctgaggatctgctgggacgacaaacagcccagcgagcaaaggacattgcccgaaaagtctttgcagcacgctttttgctaccaaacaacaaacctgctcgactccttaaacaaattgttgaggctggtcttccccataaaacttttgtagaaatactatttttatttgcgtgtcgtgctgataatttattgtatgattttacgctaaatatttactgggcagcagtagcacaaagacgaaagaaaattttcactcaagacgttttagacttcttcgagtcagctgctgttgatggacgaattctctctccttggtctgagggaacgcaggtgcggacagctaggggattgttagcgacgttgcgtgatgttggttttttacgcgatgttagtcatggtaaatcggagcgagagattattccctactacatatctgatgaaggtgtagcttgccttgcacgctatctccatgaatcaggaatttctaactcagctttgtgtgaacaccaagactggaatatttttggtctcaaccgtgaacaagtgtgcgatcgcctagatcaacttggagaacaccgtggattaatcatacaaaaagctgggtcagtagtcagcatcacttggaaggtcaactctatggaggaacttattaatgtcctctctcgatgaaacttttgaattacttttacaaaagctagaccgcccagacaccctcaatgctgctaaaagtgacccaattttttacttcgtttacaaacccgaagatatgctcaccctaaagcagcgtttatcgctttggaaagctaaattaagggagttgaaatttgatgttgaaagaatatcgctctccgaccttttgtggcagattattgacgaatcagggcggtgggaagactggctagaaattgaaccttcagcagaggttgaggagttaaatcaagccattcgtgatgttttaactagtcagagtcgtctaattgaagaggtggcacaacgaattaattctttgatgcctcccaaaattgtttttttaactgaagtcgagatgctgcatccttatctacgctctcggactctagaaaacaagcttcatgatcgcgtgccagtaccattgataattttttatccaggttatcgggcgggacagtacggtctacgctttttaggtttccacgcagaagacagtaactatcgctcgataatcgtcggaggcatttgatggcaacaattcaatctcttttttccagcagtagacctattgaccgacagattgaaaaggtcatcgattattctgcacaggatgaagacagactagctacagaaatttcagaatatgagattaccgataatattgagcgatgttatcggaggtttctggatgtattttcggaaggagttcgtggtggacgcgtaactgagactggaatatgggtgtctgggttctatggttctggcaagagttcttttacaaaatatttgggatttgcattagaaggagagagaaaaaaagtacgtggcaagccatttctggaacttttatctgagcgctttgttaatcgcaatactatccaagccgaactactaactctagttagacaacattccactgttgtcattttccttgatttaggttctgaacaactttctgaaagtgctgccacgactgtttccacagtcctttattggaaagtattgcagtgggcaggtttttctaaagaaaagaaactagcacaactggagttaactttagaacgtcaaggaaaatatgctgaatttcagcagctatatcgagatacgtataacaaagaatgggaagaaattcacaatgatcccttactaggggttagtcgcgctgcggaaattgtcactcaagtattacctaaagaatttcctacaagtaaaaactttcgagaattgagatttgatctggctgataatttgcgcgatcgcaccagtgaaattattgatttagtgcgacagcgaaccaaatgtgaaaatatcttatttttactcgatgaagcgggtcaatacgttgctcctcgtggggaattgattcttaacttagatggaatggctcgtaatttcaaagagttaggtgaaggaaaagtctggataattgccacaggtcagcaaaccctgaatgaaattgtcgaaaaagctgcctataactctgctgaactgaacaagctgaaagacagattcccaatctctattcaccttgatgctagcgacattagagaaattacttatcggcgattattgacaaagccgcctgataaagaacaattattaaaagatttatttgctacccacggtcaagcggttttaacacacacacgactaactgaaacagtactttataagaatgatccgaacgctaccacctttgctcaactttatcccttcctgccccagcactttgatttgctgctggagttgattcgcaccctggctcggtcaacagggggtgttggcttacgttcagccattcgtgtgattcaagatgttctcattgacaaaagccgtgttttgccagcaaacactcttaaattagcagaacgtcctataggtgttttggcttgtgtggatgacttctacaacactttgcgcgaagacatcaacaaagtatatcctcacgttgtgagtggggcagataaagttgtcagaatttttcctaatgatgagatcgcccatagggtagctaaagctgtagctgctttacagccgattgatacctttccgcgcacagcagaaaatattgctgctcttctttacccagaattgggttcgctttctttattcgatgaggttcaacaagcactcaagagaattttaaatgagaaggagtgcggtttaattgaagaccctcaagcaggtggttatgtttttctcagtgaatctgttagacctttgcgagataagcgaacttcctacatccctacgtctaacgaatgctctcgcattaaagaagatattgttaagcaaatttttcgggatcaaccatccacaagacttgacaatattaaggaagtaaaagccattgtcaaactagagcataagctagtcgttggtcgggatgaaaccatcgatttcaaattagaattcgttgatgctggcggattctccaatcgccgtactgaattgatggcagaaacaaacagtcggcgagaattgaaaaactctattgtttggttggcaaaatcagacaacacagtagatgaactactgcaagaaattgctcgttctgagtgggtagttagagaaattgatgagcgagcagatgataaaggagatgtggcacagtttttgcgagcagagcggcgttcaggcgatcgcaaccgagacgaagtagcgaaaaaaattgagcgcttgctgatggaaggaactttgattttccgaggaaaacctacaccagttagtgaggcaggacagactctaaacgctggagcgcagacggttctcgcaaatgcagcaaaagaagtgtttcatctacacaatctcgcagctattcgaccagcaacggatgttgctgctaagtttttgggcgtagagcgtttagatcgcattacagagcaacttgatcctttgcgtttagtgactaaaaaagctagcaatactcgtgttaatgtcaaccattcagctttggcggaagtgctgcgagtgttccgggcaaaagtagatgagtctggttcaggtcgcttgcaaggaaatttcctacaagattttttctcggcagatccttatggctggactaaggatacagtccgttacttatttgctgcactattgacagctggtgaaattgaattacattaccccaaagctgatggcccactgcggacaccggggcctttagccgtggaggcaatgaaaaatactatggaatttagccgggtgggagtttcattgcgggatagcaaaccttccattgaagctttggagcgggctgcacagcgtttagaagagctttttgctgtggaagttgtaccgttggaagacaatatcagccgtgcagtacaaaaacagatgccagagttattagaacaaattgcagacttacctgttcgtctacgtcttttggatctgcggggagaacaaaaggcaaaagaactgcaagcaagtttaacggatatcctcagaggcgatgctagcaatgcaacagcacttttaggtagtcaaaattgcacaattcctgacgatatccaatgggcaaagcaaattgttaatttactcaacaatggcgctgaaagagaattcaaagtagcacgatcgttactcaataacttagatgaacttaaggatttattttccaagcaggtgctagaactgtcatctcaaggtaatcgagaagctatttacaatgtttttcactcagaacggtttcaagaacatctaccagagttgcggcgagcagttcgagaattgacggggcaattagaagaacgctacacaactgaggttgcagagtataaacaagacttacaaaaagccttaaacggcttggagctagagccagaatggttaaaactaactgacgagcagcgaaataatattgccgatcgcttgcagatggatgttgccgaacaaattgacggacagaatccagtgcgatcgctccaggtgattctcacccgccgtttaggtctaactggagtagttgataatttacggcggcagatacaacaatcagtgccacatgaggcggaatcaacaaatgggctagcaggtacttactctgtagaaaatctacatgaaacagaaagagtgaatacacctactggtgaatacactgtagaaacagcaattgatgcagccgaatttgtcatgccagtacttatagaaaattctgagcaactggatacttggttagcttccataagaggaaaactactagaaattttgaatttacgtaagcgtatacgcattaagggataaatatgagctttgatcgagaaaccctcaacgccttagctagaatggttgcagcgtgtaggcggcgactgacggaagatgtagaaaatcaactccagcagactttcgggttgtatgtagatggcacaattcttcccttatcccaattgacccatctgacagaggagcaaaaggttgcagcgcaagcattacgtgaactgctaaaccacttcaaagccagcgacccacaaaaaagctatcaatctgcttacaatcgcacaattctggaaatctcctttaccatcctcaaccgtttggcagctttgcgcttgtgtgaggagcggaatttagtaattgaatgcgtccgcaaaggaatggagtctgacgggtttcgcttgtttgaaagacttgccaatggcagtttggggagtcgttacgaaacctatcgggtgtttgtggagtccatgtttgacgagttggcggtggatttgggagtactatttgaccgcactactccacagtcaacgatttttccgagcgatcgcgtcttaacagaagtcttcgatttgctcaatgatgtcacactgcaacttgtctggactgaagatgaaacaataggctggatttaccaatacttcaatccacctgaagaacggcgagcaatgcgggaagcgtcccaagcaccccgcaatagtcgggaattagctgttcgcaaccagttttttactccacgttatgttgttgagtttcttacagaaaatacccttggtcgcctctggtatgagatgcgtcaaggagaaactcgaatcaaagatgaatgccagtattttgtcgaaaattctgagcaattcttagccagggatcgtaaagacccccgtgatatcaaagggctagatccggcaagcggtagcggtcattttctcctttacgcttatgacttatttgaggtgatttatcaggaagcatgggaagatgaaaattccccgccctcagaatttacgggtcgaaagttgcgagaagattacccaactttagaagagttgcacagacagttacctgtattaattcttaagtacaatttgcatggtattgacattgatgcccgtgcttgtcaaattgccgctcttgctttgtggctacgcgctcaacgttattaccaatcgctaaatattaaactaagtgaacgtccacccatacaaaaaattaatattatctgcgctgaacccatgcctggggaagaagaattactcgcagaatttatcgatgagttgaatcagaaacgtccaccaattattggtgaattggtaagaaaagtttttgaaaagatgaatttagccggagaaactggagcattacttaaaattgaagaagaaattagagatgagattacacaagctaaaacacaatggctagctgaatataacccagagcaaccaactctattttcattaggagaatattcagatgttaaccaattaagtttatttaagttcgccggaattaccgatgagcagttctggactcaagttgaagactgggttatagaagagcttcagaactatgctaatcgagcaacgacagggcaagttttccagcgtcagctattttctgacgatgcgctacagggatttgcctttgtggatatctgccgtaagcagttcgattttatattaatgaatcccccatttggtgaggtaagtattccttcaaaagaatatattgaagaagtttatgaagataccaagggtaatgtttatcaaacctttgttgaatgtttccaagacaggctagtagcaggaggattcttaggggttatttctagcagaacaggctttttcttggcgcaatcaagcgattggcgtaaaagaatattactgcgtttgtatcgtccgttattgttagccgatttaggttatggtgttttggaagcgatggtggaaacagcagcctatgttctacgtagtattacaatagaagaagataaaaacttaacattaaatcttgttccacaactattagaaattcctgtagatagacagagatgttttagcattcccaaatatcagaaacatcgaggcggcttaaagcggcatcaggctaatcaagaattaaaaaaactgcacgaaaatggttatatatcattgacactaggtcgttttattcgctataaagctaattttgcaaaaattcaacagtctgatattcctagttatttagcatatcctaatttaatttgttttcgactgttggaggaaggagataaaaaaagtgccttaatagatattttacaaaattacaatgactctagatattttgtagtttcgccagaaagtttttcaatggttcctaatacaccattttgttattgggtaagtaataatattcgccagttatttactaaactgccgcaatttgaaagtaatggtagaatcgctcaacacggagcatcaacaaaaaaagatccacgatttctacgtctttggtgggaaatactacctaataaaatagtaactggtacggtagaaacaacaccagaacagttttgtcaacaaacttttgaggataagccttgggtcttatttgctaaaggtggagcttattctccatattatgcagacttacatttgctaataaattggaagaataatggcgaggaaattgaacaatatgttttatacaaatatccatatctaggcagaagtggtgcagattggattctacatagggagtgtaattatttccaagcaggcttaacatggactactcggactactagcaagattagttttcggaatttgcctgcgggtagcatatttagtagtaaaggagcagcagcttttactaaccatgaaatgtattggttggctattttacaatcgtctatctctgaagctttaattagtttgcagcttgcagcagtagatgcagcagcccgctcttatgaagtaggtttaattcaacgtacacctgttcctcctaatagttctgatttccataaggaaatattagtaaaattagcagatttttgtattggtattaaacgctctttagatacagtaaatgaacatagccacatatttcatatacctgctctgcttcaagcattaggtaataacttaactgataagatttttaattgggaagataatattaataaatccactaaacgattaagtaagtatcaagaacaaattgatgatgtcgtcttccaactttacggaatatcaaaaacagagaagaaaagtcttgaaataaatattaaaaacaaaaatataagaattgaagataatactgaagatatagacgaagaagatgaaactgcactagcagcagacgcaaaacagctagttactgatttactttcttatacactcggttgctcttttggtcgttgggatatccgcttttctacaggcgataaatcagcaccagaacttcccgacccctttgcaccattaccagcctgttcaccgggaatgcttattggtactgatggtttaccagtttcagaaactccgccaggatatcccattcccattgcttgggatggcattttagtagatgaccccaatcaccccaacgacatcacccgtcgtgtccgtgaagttttagaaattatatggaagaacaacgccaataaaattgaacaggaagcttgcgaaattcttagtgtgtgtgaactgcgggattacttccaacgtcctacaaacttctttcaaaaacatctcaaatgctataccaaaagtaaacgcaaagcaccaatttactggtcactttctacaacatctagttcttacacagtctggatttattaccaccgccttacagaccaaacgctctacacaatcgtcaaccgctaccttgaaccaaaaattgccgaggttgagcgtatcactggtggcttagaaaaagaattagagacaaaatcgggacgggaagcttcacaagtacgcgataacttacacgcaacacgcaaattcctcagtgaattgcaagatatgaagcaggaacttttgcgcgtcgcacagctaccttacaaacccaatctcaatgatggcgcaattatcactgccgcccctctacaccgtttatttgctttgcgacagtgggcgcaagaaaccaagaaatgttgggaaagtttggaaaaaggcgaatacgattgggcgcatttagcctacacaatttggacagacagagtgcgggaagtctgcaaaagggataaatcaattgcgatcgcccacggacttgaagaagtttaccaagcagctaacccagaaaattcccaacccaaaacaaccaaaggcagaagccgtaaaaagacgacacaggagtcagtataatgagcgtctcagactttgtttgccgacaattacaccaaagattagaacagcaccgtattgtcgtttggtacgatggcaatcgcgcttttgctgattttattcaatccttccaagctgactcctgtgtagtcgtatctgctgttgagtctattttgaactcccgtcgtcaagccgaagccgtctaccgccagatgaacgagtctaataactcagccaaagctgggttgaatctcctcatttacgtaccccgccagcgcggaacaatagaagatgagaagcggcaagatccgtttgaagttttcgcatgggctggtgtggcgtttggcgacaaagaagcagaacagttagaatctcttgctagacaagcaatgccagaacgggctatagaaattactcggctatttgcccaaggcagtccaacgctatcgatgttggataaattacagttccatcaccgttcgcctttactgttagaggcgctaggtactgactcaccatcagaagcgatagccttagtcctctgcttagaggagaaatcacaacgaattgattctgttaaaggttgtttaaaagaatttttgccgttattggcaacggagattggttttaaacctgcatccaaagctaaatcatggacagaaattagaaagcaactcattcagtatgtgctgtttagcgaatttgccctcgacctgccttgtgacctgccagagtcattaagtaccttacccagagccaaagccagccatgaattagtgatttttgcagtgtgcgatcgcatgagggatagttccgacttgcgatcgggctatgttcagctagcagtagaagtagaaaaccagttgcaccttggcaatctcacagaaaatatagctcaactaggtactagagataccttcccctttgcagaaaagcgatacctacagcaagtgctggagtatgtgcaacagaataacttagcagatgcccagaagattttaacccaacgccgtcattccatctggaacaaccacttggaacgaggtaatatttggatgatagtagagcgttgtgtgacatttctcgccacaagtaatgctgtagaagagttgtcaaaaaaatctttacagtcaatgtctttacgccaaatcatctctgcatacgcacctccagatcgctggggatgggcagaactagaccgacatcagcgactatttgaacagggtgcaaccgcctatgcaggagatgagggagagatagaatctttagtcgaattttgccgccgacgttacttagaagtggcattagcaattcaagactgcttccttaaatgtgttcagaaagaaggttggtttcccgaaggagtgctgcgataaacccaaatatttgaccagtatgtagctcctctactggaacagaacaacaaaaaagtcgcattttttctagttgattccctgcgcttcgagatgggacgagatttggcagaagctttagaacagttgggcgaagtcgagattttaccagtcgcatctgttttacctacaactacaccttgcgggatggcagcactgatgcctaatgctgatggtacgctcagactggtggaatcaggcggagagctaattcctgtcttaggtgaaaggaaactggaagagtccaagcaccggatgcgactgctacaggaaaaatacggcgatcgcttcaaagatatcgaaccggaagatattttcagcaaaaaggtaaatgccttgggtaagcagttagcctctgtggatttattagttgtccgcaccaaagaccctgaccgcattgctgaaagtattggcaacatgaaagcccgaaaatatctttcggatatagtcgctgaaatggtaaatacaattcgtcgattatctacaattgggttcacccattttgtcattagtgcagatcatggtcacgtcctaattgacgaaataccattaggagatgtaattcccaaaccagggggtgagtggttgaaaactaagcgcaggagtttgcttgggcaatttatatcgggcgaatcttcaagtgtagttatcttcaaaactgagcaggttggtatccaaggcgatgcccaagacctctgtgttgctaaaggctttaaagttttccaacaagttgaaggttacttccacgaaggcataagcttgcaggaagcgatcgtgccattggtaattttgcgatcgcaaggtaagattactgctcagagtaagccaaatattttcctgcgttataagtacgattactttaccaataaagtcattaatctgcgagtctgctatgaatatttgctaccagaagcaatacaagtccgcattgaagcttacgatggctcaacagcaaaagccaagcgggtaggtaaagcaaccgactgtgatgctagagacgaacgaactggtgaaatcatactccagcccaatcaagaaacttcggttcctatcttactggagtctgacgacatttcatgctccaaaattgaaatacgagtaattgacccacaaactggcgtaatttgggcaaagttagaactggaaaatcgcttactagattaagaatgaactcatgtttcaagatgccttagaccaaaaagttaatcaaacatttccaggaaaggtagtacgtaaggacttgctacatcaaatcaagggtggagaaaatgtaccatcttatgtactggaatatcttctgggaaagtactgcgcctcagatgatgaagatgaaatccgcattggtattcaggctgtcaaagaaacactacaaagcaactacttccgccacgatgaagctaacaaagcccaagcgctagtagaacaacggggacgacatcgatttatagaccgtatagaagttcgttatctcgccagtgaaaacaaatattgggcggcaatggatcactttagttactccagaattcatgttgctgaccgattttatcgacaatacgaacgacttttagaaggtggaatttggggtcttgtagatgttgaatttcaaccaactgaagaagaaggtgctaaagccagtccctttcacattgctgacttaagaccaattcagttagcaagatttaacgttgatgaatatgcagaaggtcgtcgcagcttcagccgcgatcaatggattgatattttgctgcggagtgtgggtttagaacctacccaaatagaacaacgtttaaaactgctgttactgactcggttcattccctttgtcgaaaaaaattataacttcattgagctagggccacgaggaacaggtaaatcctatgcctacagtgagatgtcgccttacagcatcctcatttctggtggtaaagccagcactgcaaaccttttctacaacaatgcccgccgtcaggtaggtttagtaggtcattgggatgttgttgcttttgatgaagtcggtggtttgaaagttaccgatgcggatgcaattcagattatgaaagattacatggctaacggtcgtttcagtcgtggaatcacccaagttttagctgacgcgtctttggtatttgttggtaatcttaaccaacctgttgaaactctagtccaaaatactgcaacagacttatttcagccattaccaaaagaatttgatctggctttacttgaccggatgcacttctacttgccaggatgggaagtgccaaaaaactccaaaaatctgcttacagaacactatggttttgtcactgattatttggctgaagcgtttcgtaccctaagaaaacaaaatcggtttgatgaagtcgagaaagtcttccgttttggttctcatgtagaaggacgagatgcgatcgctgtcaaaaaaaccgttagcggattacttaagattatccatccagacggagaatggacaaaggaaaacctgacagaatatgtagaactagccttagaagggcgcagacgagttaaagaacaactcaaaaagcgaggttctttcgagttttataaaaccagtttttcttacatcgaccaggaaaccgaagcagagatgacagtgggtgtaccagaacaaggtagtgctggaattatctctcaagaacccttacccccaggcacagtgtacaccgccacagcagatggagaagcaagggttggtcttttccgcttggaagtagcttgtacatcggggacaggaaaattgcgaacccctacaggacttgacaaagctttgaaagaatcattaaaccgcgcttacagctatcttcaaagtataaaggaaagaaaaggactcaatgaaactttgggattgaaagatatttacgctgaagctgtggacttgtctggaagtcgtgttgaatgtccttgtggtgtagcattttttgtcgccatcatttcagccatacagaatcgtcaaatccaagctggaactcttatcttgggcgatttaacgattcaagggaatatcaaaggccctgcttcaattgttgaatcattacaaatagcaatggaaagtggagctttacgagctttagtaccactttctaataaaagccagtttgcaggtttaccagaagagatagtcgaaaagctggatattgtgttttacggtgatgttgaccgagcagtaattaagagcgtcgaaatttaagagactatccctattatgtcactctcgaaaaacaataattgaaacaagattctaaacctttgatttaattaagcttcagcctttattttctaacaataactaaatttatagccaaaatcagaaaattaaagccctgaaagctttccagcgattcggttctcctaaaatgacacaacagggctatttataaaataaatctttaggctacaagacgacttagcataatcctactttgagaaacctttaatgtagctgatgagatgttgatctatattgtcgatatcacctttaagctactgaaaatcgagttctgaacggttatgaaatgcgattgctcgtgaccttgtagatgcagttcaccgcaattttgctatcgactggccacagaaataactttttaaaactaacctctgccgattagcgtgtgaggtcgagaattttgttgtgcgatcgcctcactacgaacaaatgctaacttttttacacccctttaaatttgcttgtttctagtatcgctgtttctacgatttttttgagattaatagcacctccaattacagtagaaatactgtgaatttagcttttattgacttggtacttagctaaaatactattcttctattggagtattgaggagcgctcgcgcaataggaaaagcaagacacaatatttatttataaaaaggaaataattcagcttaaaggtttcttaatggaacctgacgggaactttcaatctttcatcaacgtgattatagtaagctcaacagtaaatatacgatttatagttatttagttattgttaaccttcaagccatctaagctaaattacggatgattaacccccagctagacaaaactattgagcgttatgagacggaaattgagagactgaaagtgactgacacggccatagatgccgaacaagttttggaagtgttaagtgccagggatgctgtgcagttagccttaaagggtgcaacattcattcctagcagtaggctaaagcaggttctagagttagatgcagaactcaggaaacaagcagtacacattaacaaagttatcaaagctgaacaattcgcccagtggcgagaaagtacacatcctcctgctgaagcttggtggtggcggttagaaaatcttacccctcaccataagtgggatagatttgattggttgtggaagggtctagtagttgctggctggactgctaacctcagtttattaatcaatattgctactcgctttttgagcgggggagcaggattattgggagcttctgcggttattttgccgagtattctggcattgctacaggcaagtagtgaactaactcaagcaggtaaacaagaatttgacaaattactcacaaaactgaatatcccccagcacttacacgaagaagctaagttcggatcaactttattaatgacaatctttttacttggtttttggttggctctaccgtcaatttcccaactctacaaccgtcaaggactcagtaattacctacagggaaaattaggagcagcagaacaagactaccttaaagcaatttccttggatgccgataatgcagatgctcattataatcttggcaatctttacgaggatttacaagattttgagaaagcacggaagcattatcaaatcgcagtgggaagtgacgttcctgatgcttacaataatctagctcgcttatacatccaggataaaaaatattcccaggctagagctttgctacaaaatggactagtaaaagctaaagaccttcccgaagtcagatacagcctgtttaaaaatttaggatgggtaaggtttgagcaaggcagatatgaagaagcacaactaaacttacaagcagcaattggtattgcaaataacccagaggtagcaaagaatatccaaaatactggtgcggcgtattgtatcttagcgcaggtaatggagcggcaaaaacaaccggccgctttggagcaatggcagaagtgctgtgaacaaggttctactctcaatgctgatgaagacacatggttgcatctagctcggcaaaaattacaaaaggcaggaagagtatgcaaatagaccggaaaaagattagtttcttagccattgtactaagcctaccttttatgacggtagcaacacctgggctgagtcaacagaatagtctaaattttatctccgaagttaagggagatgtcaaaattcaacgttctggacgcaagaaccatcaaaaagcatatggtggtgaactactagattcttctgattctttgcgattgggaaaaggtgcttctacaaaagttgtatgtaataacttatccatttggaatattaaatctccagggaaattttcagtctctagtggttgtccatccactggaaaaccagttcttataagaaatggtagtgaacgcgctccgactcgcgctcccaatgacccgacaattccctacatcattagtccgcgtgatacagcaattttgagtggcaaacctactctgcgttggaatgctgttaagggtgcaaccagctataaggtgacgttacgcggccctggtgttaattggacaactaatgtgaagcagtcagaagttgtttattctggtcaagaacctctacagccaggttttcgttatcgggtagttgtgactgctgataatggagcaacttctgagagtgatgcacctgttggattcaatttactgagtgagggggaggctcaacaggtaaaagctgaaattacacaattacaaaagcaaccgctaactgatgaatctaaaaatcttgctttggcatatttgtaccaaagcaagaatttaaatgctgtggcaattgatttattagcaggcttagttaagcaagaaaaccaaagcacagcagtttatcagcttttaggtagcctctaccaacaggtaggtttacatcgattagctaaagaacattacttaactgcgctcaagttagctaagacaaacaaaagtctggaagcgcaagcaatcatccaaaccagcttaggagaaattgatatagttcttgacaacttgcagcaggcgtttgagtcattgcaagctgctcaaaataactatcgtgccttgggagatgagcaacaagtacagcaactacagcagaaactagatgacttgaaaggaaggctaccatcatgaataacctgcgaactagacaattagtaaccctaacaattttggtagcaacagctggattatgggtgttaatgccaaagcccacaattgggcaatcaacccctcctgtttctgctgctcagtctgcggaattggcggaagtagaaagactcaatcaacaggtgattcaactttatgaaaaaggcaaatatagtgaagcaattcccttagcagagcgtgcattggctatccgtaagcaaaaactaggcgatgagcatccggatgtggcaagnnnnnnnnnnnnnnnnnnnnnnnnnnnnnnnnnnnnnnnnnnnnnnnnnnnnnnnnnnnnnnnnnnnnnnnnnnnnnnnnnnnnnnnnnnnnnnnnnnnnnnnnnnnnnnnnnnnnnnnnnnnnnnnnnnnnnnnnnnnnnnnnnnnnnnnnnnnnnnnnnnnnnnnnnnnnnnnnnnnnnnnnnnnnnnnnnnnnnnnnnnnnnnnnnnnnnnnnnnnnnnnnnnnnnnnnnnnnnnnnnnnnnnnnnnnnnnnnnnnnnnnnnnnnnnnnnnnnnnnnnnnnnnnnnnnnnnnnnnnnnnnnnnnnnnnnnnnnnnnnnnnnnnnnnnnnnnnnnnnnnnnnnnnnnnnnnnnnnnnnnnnnnnnnnnnnnnnnnnnnnnnnnnnnnnnnnnnnnnnnnnnnnnnnnnnnnnnnnnnnnnnnnnnnnnnnnnnnnnnnnnnnnnnnnnnnnnnnnnnnnnnnnnnnnnnnnnnnnnnnnnnnnnnnnnnnnnnnnnnnnnnnnnnnnnnnnnnnnnnnnnnnnnnnnnnnnnnnnnnnnnnnnnnnnnnnnnnnnnnnnnnnnnnnnnnnnnnnnnnnnnnnnnnnnnnnnnnnnnnnnnnnnnnnnnnnnnnnnnnnnnnnnnnnnnnnnnnnnnnnnnnnnnnnnnnnnnnnnnnnnnnnnnnnnnnnnnnnnnnnnnnnnnnnnnnnnnnnnnnnnnnnnnnnnnnnnnnnnnnnnnnnnnnnnnnnnnnnnnnnnnnnnnnnnnnnnnnnnnnnnnnnnnnnnnnnnnnnnnnnnnnnnnnnnnnnnnnnnnnnnnnnnnnnnnnnnnnnnnnnnnnnnnnnnnnnnnnnnnnnnnnnnnnnnnnnnnnnnnnnnnnnnnnnnnnnnnnnnnnnnnnnnnnnnnnnnnnnnnnnnnnnnnnnnnnnnnnnnnnnnnnnnnnnnnnnnnnnnnnnnnnnnnnnnnnnnnnnnnnnnnnnnnnnnnnnnnnnnnnnnnnnnnnnnnnnnnnnnnnnnnnnnnnnnnnnnnnnnnnnnnnnnnnnnnnnnnnnnnnnnnnnnnnnnnnnnnnnnnnnnnnnnnnnnnnnnnnnnnnnnnnnnnnnnnnnnnnnnnnnnnnnnnnnnnnnnnnnnnnnnnnnnnnnnnnnnnnnnnnnnnnnnnnnnnnnnnnnnnnnnnnnnnnnnnnnnnnnnnnnnnnnnnnnnnnnnnnnnnnnnnnnnnnnnnnnnnnnnnnnnnnnnnnnnnnnnnnnnnnnnnnnnnnnnnnnnnnnnnnnnnnnnnnnnnnnnnnnnnnnnnnnnnnnnnnnnnnnnnnnnnnnnnnnnnnnnnnnnnnnnnnnnnnnnnnnnnnnnnnnnnnnnnnnnnnnnnnnnnnnnnnnnnnnnnnnnnnnnnnnnnnnnnnnnnnnnnnnnnnnnnnnnnnnnnnnnnnnnnnnnnnnnnnnnnnnnnnnnnnnnnnnnnnnnnnnnnnnnnnnnnnnnnnnnnnnnnnnnnnnnnnnnnnnnnnnnnnnnnnnnnnnnnnnnnnnnnnnnnnnnnnnnnnnnnnnnnnnnnnnnnnnnnnnnnnnnnnnnnnnnnnnnnnnnnnnnnnnnnnnnnnnnnnnnnnnnnnnnnnnnnnnnnnnnnnnnnnnnnnnnnnnnnnnnnnnnnnnnnnnnnnnnnnnnnnnnnnnnnnnnnnnnnnnnnnnnnnnnnnnnnnnnnnnnnnnnnnnnnnnnnnnnnnnnnnnnnnnnnnnnnnnnnnnnnnnnnnnnnnnnnnnnnnnnnnnnnnnnnnnnnnnnnnnnnnnnnnnnnnnnnnnnnnnnnnnnnnnnnnnnnnnnnnnnnnnnnnnnnnnnnnnnnnnnnnnnnnnnnnnnnnnnnnnnnnnnnnnnnnnnnnnnnnnnnnnnnnnnnnnnnnnnnnnnnnnnnnnnnnnnnnnnnnnnnnnnnnnnnnnnnnnnnnnnnnnnnnnnnnnnnnnnnnnnnnnnnnnnnnnnnnnnnnnnnnnnnnnnnnnnnnnnnnnnnnnnnnnnnnnnnnnnnnnnnnnnnnnnnnnnnnnnnnnnnnnnnnnnnnnnnnnnnnnnnnnnnnnnnnnnnnnnnnnnnnnnnnnnnnnnnnnnnnnnnnnnnnnnnnnnnnnnnnnnnnnnnnnnnnnnnnnnnnnnnnnnnnnnnnnnnnnnnnnnnnnnnnnnnnnnnnnnnnnnnnnnnnnnnnnnnnnnnnnnnnnnnnnnnnnnnnnnnnnnnnnnnnnnnnnnnnnnnnnnnnnnnnnnnnnnnnnnnnnnnnnnnnnnnnnnnnnnnnnnnnnnnnnnnnnnnnnnnnnnnnnnnnnnnnnnnnnnnnnnnnnnnnnnnnnnnnnnnnnnnnnnnnnnnnnnnnnnnnnnnnnnnnnnnnnnnnnnnnnnnnnnnnnnnnnnnnnnnnnnnnnnnnnnnnnnnnnnnnnnnnnnnnnnnnnnnnnnnnnnnnnnnnnnnnnnnnnnnnnnnnnnnnnnnnnnnnnnnnnnnnnnnnnnnnnnnnnnnnnnnnnnnnnnnnnnnnnntagcttgaataatctggcattgctgtactggaaccaagatgacacaagccgcgctcttgagtttttaactcaaggaataacagttcaagaacacaacctcactctcaacttggctgtcggttttgagcgacaaaaacgcgattacgtcaagactatctctgctaccacagatgcttccatttcactgcacctcaatggtgctgctaataaccccagtgctgctaatttagctctaagcacagtcttacaacgcaaaggacgcatcttggatgtcctcactaatagccagcaaattctacgtcaacgcctagacccagaaagcaagactctgttaacgaagttagcaaacacccaaactcaactagccaatctattttataaccgaccagagaaacttcctcttgagcagtatcggactcaaattgcccaactggaaacccaagcaaaacaactagaagatcaactgagtcgtcgcagccaagaatttcgtactcagtcccagcttgtcaccattgaaactgttcaaaaattaattcctgctgatggtgctttggtagaaatagtccgctatcgacctgttaatcttaaagcagcacctgaagatcagtttggtaaacctcgttacgcagtatacgtccttccagcaaaaggacaacctaaaggtattgatttaggcgatgctgaaacaattgagcaaactctcatccaattacgcaaggacttgcaagatcaaaaaactcctatttctcaaatgaaacagtcggctcgtgagttggattcaattctcatgcagcctgtacgcaaacttttgggcaatactcgcaaaattttactctctccagacagtcagcttcacctcattccctttgaggcactggtggatgaaaataaccgctacctactagaaaactattctttcacctaccttacctctggacgagacttgctcagactgcaaaacaaatctgccagtaaacagccgccagttattattgctgaccccaatttcaatcgtcctggcaaattagttgcgcgtcagccttatgctaatagtattgatgcaaatacccgctctatagacctgtcccagaaagtatttccccccctccccggtacagcacaagaagccaaggccattgccagtctattaaaaatccaacctcttacagacactaaggctactgagggtgctgtcaaacaagttaacagccccaggattctgcatattgccacacacggtatttttgaaaatcccccagcaaacgaagggaaaaccacacttgaagataatccgctactgcaatcaggattagttctagctggcttaaaacctcgtcagagtgctggtgaagatgggattctcactgccctggaaacaactacactcaatctagttggtacaaaactggtggtactctctgcctgtaatacaggtttgggtaatattaatgcaggtgaaggcgtttatggtttgcgtcgcgctttagtcattgctggttctgaaagccaagtcatcagcctgtggaaagtagcagatgatgctactaaagattttatggtggcttactaccaaagattattagataatcaaggacgcagtgaagcactacgccaaacgcaactagagatgttaaagggtgataagtatcagcatccctacttctgggctgcgtttatcccttctggtgattggaaaccgatgggtaagtgagttagttttgagagctttggcgatccttccatattatcggctcaacatgaaatagagtgcgatcgcctccctcgaaactaaactgttgattcagctttgtactgggaatgcgatgcgatcgccactaaatcttggagtaaatattcccaaatccttacggggaagtaatttgcaaaattgtacaacttttttatttctttttggatagtagcctgatgaaattgtagaactttattttttcaagacttcttagtaatcaacgatataacaatccttgtagccgcgcaaattatacaactttattatatttatacagaggttgtagagaaataattcgattcaacaataaagatgttaaaaataacctctaaagaattactaaaataattgcaaatagaggttatttttattggaacagagacaaaacaggtttttcaaaggctagagtctttcgatatcaggtaaaatttgataaatctgctgccagtgaggacttatccagccaacaatacgcactacttctcgtaaaattacgatagacaaaccgcattcaaccttctcaaaagcagttgcacaatctgttaatagacttacgaaactatctagtttttgtaatttcatctttgctaatccatctgcaaattgcccaatttgagctaatactacactaatttcgcctaaactctcttcgtccatatccttacatattaaatcccaatctttcttgatttctgaaaatatctcctcagcttctacttcttgcccttgttgataaaaggcttctactaaactatataaagctactatcttttctggtgtatcttcaatcaagcctgctactttcttagctttagaacaaaagccaaatcttgctaagacttgtgttaaattctctaataaaaatggttgatcaaaaggattatccatttcaagaatcatttcttctatttcagttagcaatatatctgctctttctgcgtattcacccttataaaggctatttaataatattgttaaagcttggatttggaaaaaaccagtttcaagttttctggctattctttcggtagctaaaaatagagtattagcatttttgggtttgtttatacaattaaatgcgactgccaaatcagtcattaatcataagcgataaggctcatt

SEQ ID NO: 155 - DNA, 36 bp, synthetic construct
  misc_feature 1..36: note = Synthetic
  source 1..36: mol_type = other DNA
ctgctcaacgcctaatggcatctaatgttgaagcac

SEQ ID NO: 156 - DNA, 36 bp, synthetic construct; identical to SEQ ID NO: 155
  misc_feature 1..36: note = Synthetic
  source 1..36: mol_type = other DNA

SEQ ID NO: 157 - DNA, 36 bp, synthetic construct; identical to SEQ ID NO: 155
  misc_feature 1..36: note = Synthetic
  source 1..36: mol_type = other DNA

SEQ ID NO: 158 - DNA, 36 bp, synthetic construct; identical to SEQ ID NO: 155
  misc_feature 1..36: note = Synthetic
  source 1..36: mol_type = other DNA

SEQ ID NO: 159 - DNA, 16 bp, synthetic construct
  misc_feature 1..16: note = Synthetic
  source 1..16: mol_type = other DNA
aggcattacacaatac

SEQ ID NO: 160 - DNA, 16 bp, synthetic construct
  misc_feature 1..16: note = Synthetic
  source 1..16: mol_type = other DNA
aggcattacacaatac

SEQ ID NO: 161 - DNA, 16 bp, synthetic construct
  misc_feature 1..16: note = Synthetic
  source 1..16: mol_type = other DNA
aggcattacacaatac

SEQ ID NO: 162 - DNA, 16 bp, synthetic construct
  misc_feature 1..16: note = Synthetic
  source 1..16: mol_type = other DNA
aggcattacacaatac

SEQ ID NO: 163 - protein, 243 aa, synthetic construct
  REGION 1..243: note = Synthetic
MIAPLILYLDVPFTTFRESHAREMGKTYPVPPPATVYGMLLSLVGETNVYRHCGVELAIAMLSSPKKSRILRQMRRFKNADFSHPENVIPCYQEILSNLKCLIWVRSDEEKIQPSLRERIQLAFDHPELVRRFGCLFLGESDQLIKTIKLAREDYLEGVRQWAIRDNRGRLTLPYWVDHVGSRNTRFLRYRIEEMDRLSPPDLAWTMVQSPIGGSGGGGSGGGGSGGPKKKRKVYPYDVPDYA

SEQ ID NO: 164 - protein, 251 aa, synthetic construct
  REGION 1..251: note = Synthetic
MTAILIQSEEYVDLTFKLRGAPIPLDNGYLTYAALSRICPPLHELKSIGIHPIAGIPTRNNLLELTAQSRLKIRIYHQQIPLIYPYLAGQAFHIGQNFYQLDIPDYKPLISSESVYSRLVIIKGFQDSTNFIEAVQRQMDNLGIQGKIELLTRQDGTPQRRQLTINKEGKQFKVRGFGVKISELNPEDSLTLQEQGIGGKRKMMCGIFVPATRSKEEEETGGSGGGGSGGGGSGGPKKKRKVYPYDVPDYA

SEQ ID NO: 165 - protein, 354 aa, synthetic construct
  REGION 1..354: note = Synthetic
MMTQKKNDSNIPNYYLYGTVLTRYGLASLNHDIRRGNKTILQKGYWNNGKIHSFVGSSAIRWALRFYLQKQGYLVNRVWDEEEHINRLTSEDFDPEKFYDDDIFGFALLESAETEEDTSTTKRKKKQTKTSTPNQRMGALGMNMAVSLTPYDGAVKLGAKSGREKDSTSLHFTEYHATRYQYYFGIDATHLKDFSRILPMIDGIMNLPKVGGSSNIFNYPFCPDSLVFQWTNHFASYISYCFEYCDPKSKEAKLSQEFIDEVECGQIDPSKLWIGGTIVKDLQQLDNFESSPLNKAHIYRNRNEMIEALKTVIKRDLGLEESKGGSGGGGSGGGGSGGPKKKRKVYPYDVPDYA

SEQ ID NO: 166 - protein, 557 aa, synthetic construct
  REGION 1..557: note = Synthetic
MIVSTQPKISLSLHAADTTIMHRVGMTGLYMTLKRLEKQYPLSRQRGGHISWFLTADTIELFWEGSDFIALSWLINESFQLDDTGLIHLVGLDNDRIDLRQKIHIHEGICGVFLRLNKFYQAGEIINTELRFEEKQVEYQYKSLTWYAHQTFAEKLCEADTQQLRHDYIQITSWLYLGGIVRHARTQNTTKLEEKPEYALALLFVPVVCHYCLLHIPSEDLKERKPHRYLVVIPEIKDFEDASQRRWRLQQLETKQFHVSSLGEAGLLYYSLDDIQPEVAYYQACQVWLYEKTNKASRQRTLMSIEEIKIDKNILITYQQVQKYFKTNYQIIKYKQIFIKVNPIRSLIADNLVKGIHWWSNFWEKLVIEDSKEYLFNQLFSNREGFIIMAENSEEDKQYLIFIKVFQQAMKGNFAKIYAKTEEGKDPPIKKKVERLRAELNYCYDELSFKEYLSDFLVRGGLNKYFNEHQEEIALLIKKSPWQEIRIWSLLAIASYKPKDKLTNRDDSSLSNNQKLEEVNDDSEEEGGSGGGGSGGGGSGGPKKKRKVYPYDVPDYA

SEQ ID NO: 167 - protein, 243 aa, synthetic construct
  REGION 1..243: note = Synthetic
MYPYDVPDYAPKKKRKVGGSGGGGSGGGGSGGIAPLILYLDVPFTTFRESHAREMGKTYPVPPPATVYGMLLSLVGETNVYRHCGVELAIAMLSSPKKSRILRQMRRFKNADFSHPENVIPCYQEILSNLKCLIWVRSDEEKIQPSLRERIQLAFDHPELVRRFGCLFLGESDQLIKTIKLAREDYLEGVRQWAIRDNRGRLTLPYWVDHVGSRNTRFLRYRIEEMDRLSPPDLAWTMVQSPI

SEQ ID NO: 168 - protein, 251 aa, synthetic construct
  REGION 1..251: note = Synthetic
MYPYDVPDYAPKKKRKVGGSGGGGSGGGGSGGTAILIQSEEYVDLTFKLRGAPIPLDNGYLTYAALSRICPPLHELKSIGIHPIAGIPTRNNLLELTAQSRLKIRIYHQQIPLIYPYLAGQAFHIGQNFYQLDIPDYKPLISSESVYSRLVIIKGFQDSTNFIEAVQRQMDNLGIQGKIELLTRQDGTPQRRQLTINKEGKQFKVRGFGVKISELNPEDSLTLQEQGIGGKRKMMCGIFVPATRSKEEEET

SEQ ID NO: 169 - protein, 354 aa, synthetic construct
  REGION 1..354: note = Synthetic
MYPYDVPDYAPKKKRKVGGSGGGGSGGGGSGGMTQKKNDSNIPNYYLYGTVLTRYGLASLNHDIRRGNKTILQKGYWNNGKIHSFVGSSAIRWALRFYLQKQGYLVNRVWDEEEHINRLTSEDFDPEKFYDDDIFGFALLESAETEEDTSTTKRKKKQTKTSTPNQRMGALGMNMAVSLTPYDGAVKLGAKSGREKDSTSLHFTEYHATRYQYYFGIDATHLKDFSRILPMIDGIMNLPKVGGSSNIFNYPFCPDSLVFQWTNHFASYISYCFEYCDPKSKEAKLSQEFIDEVECGQIDPSKLWIGGTIVKDLQQLDNFESSPLNKAHIYRNRNEMIEALKTVIKRDLGLEESK

SEQ ID NO: 170 - protein, 557 aa, synthetic construct
  REGION 1..557: note = Synthetic
MYPYDVPDYAPKKKRKVGGSGGGGSGGGGSGGIVSTQPKISLSLHAADTTIMHRVGMTGLYMTLKRLEKQYPLSRQRGGHISWFLTADTIELFWEGSDFIALSWLINESFQLDDTGLIHLVGLDNDRIDLRQKIHIHEGICGVFLRLNKFYQAGEIINTELRFEEKQVEYQYKSLTWYAHQTFAEKLCEADTQQLRHDYIQITSWLYLGGIVRHARTQNTTKLEEKPEYALALLFVPVVCHYCLLHIPSEDLKERKPHRYLVVIPEIKDFEDASQRRWRLQQLETKQFHVSSLGEAGLLYYSLDDIQPEVAYYQACQVWLYEKTNKASRQRTLMSIEEIKIDKNILITYQQVQKYFKTNYQIIKYKQIFIKVNPIRSLIADNLVKGIHWWSNFWEKLVIEDSKEYLFNQLFSNREGFIIMAENSEEDKQYLIFIKVFQQAMKGNFAKIYAKTEEGKDPPIKKKVERLRAELNYCYDELSFKEYLSDFLVRGGLNKYFNEHQEEIALLIKKSPWQEIRIWSLLAIASYKPKDKLTNRDDSSLSNNQKLEEVNDDSEEE

SEQ ID NO: 171 - protein, 360 aa, synthetic construct
  REGION 1..360: note = Synthetic
MYPYDVPDYAPKKKRKVGGSGGGGSGGGGSGGTIYSEHWSLNPLEIPQRSRLFSLEPVAVGTPYAESLSSYLHRLAQAHCLTSEKLVMGEIAPLILKDEDKSELLSKNLSHLLGNSDAKPAINGMREMTEKLVTVLEELTMRQDLRFLTLLSWKGMIYDKGLFRNYRAWCPCCCEEWMQKNKTIYEPLSWSFKDVEFCLIHKQRLIEECSHCGARLPVMARLSPAGFCSRCYGWLGQEIKGEEEIEKYRVNIQGISELIALTPQLGYKPIPIELTRKLQLILLVFEQAIGKDVKLLGDLGGIMESLRIASTTNQSQPYHLVKLIIPVCEKAKISVFQLFGSDFKELGKILFGNFSLELKL

SEQ ID NO: 172 - protein, 493 aa, synthetic construct
  REGION 1..493: note = Synthetic
MYPYDVPDYAPKKKRKVGGSGGGGSGGGGSGGLASVLETYESWNLKKPLIPQRSRLYQPQPVGIGTPYIESLTGYITRIAELHGVLPGVLMTREIAPLVNKIYFQNGANRGFREIFNRSQALNGMGEMAADLVQVLQKLTLRDDLRFLTMLFWSNILTPRNLFRTRKAWCPICYQERHQNGLVVYEQLLWTINLITICPQHQKPLVELCPHCNHESPLLNWRSRPGYCSKCGEWLGANQCLKTFTDGEGSIKLQLEWQYWTANVVGELILASQCFESAPSKENITKSLNIVIDKVAENNAAAFSRLIGVPKNSLWMWQSTKTLPELNTLLKICYELEISLVEFLTPKNLITKSFTKISQKHLQLSRTPRVSPKSFDQYQVKDALLAILAGNEEPPPTMEEVGKRLGHHNRTISRHFPDLCSAISAKCRNYNKACRLKSIEKLCSEVREIVLSLNAQGVYPTEGRVCELMPNPGCFRYKQVRAAFNDARREFGL

SEQ ID NO: 173 - protein, 929 aa, synthetic construct
  REGION 1..929: note = Synthetic
MYPYDVPDYAPKKKRKVGGSGGGGSGGGGSGGKEQFEQWVARLQISEAGQKIIEKVRSSEPSRRVGGGSKNVSGRYPSRKMGVTIQFESHRVELPIIYQLEHDKDVLEFYDQPPQIKLDYQASNGRRLGVLHTPDLFVIRTNSAGWEECKTEQDLKKLAEKNPNRYFYSEENNQWHSLPGEVYANQFGLYHRIHSDREINWVLQRNLQFLEDYYRSESLVVEEAIAQSLLAIVSSQPGITLAELLNRSTGAKSDDIYTLIIQEQIYIDLNATPLAEPERCLIFRDEQTASAYRLMVEQPSVSLPAISPVVNIVTGATVSWDGKGLNIIHVGETEVILGAENNQLIELKKAIFENLVRQGKITSLQTPEKTAISTESWQRFHQASPEDQAEALERYKTIEPYLNGHPPENETIPARTIRHWKAKYLIAIQKYGCGYIGLLSHRSVKGNRQRKLPEDTLAIMEKFILEDYETLKQKRMWEVHAALVRACEEAGVIAPSYKAFTKEVQRRTGYEQTKKRQGRRAAYQHESFYWELAITTPRHGDRPFEIGHIDHTELDVELVCSDTGRNLGRPWATFLVDAYSRRLLAVYLTFDSPSYRSCLMVLRICVKRHGRLPQIVVVDNGAEFHSVYFETLLATFECTKKQRPPAKARFGSVCERLFGTSNTQFVHNLLGNTQITRNVRQVTKSVNPKNLAVWTLGLLYEYLCAWAYEVYDTDEHPALFQSPRDAFAAGMAIGGSRVHRMIPYDENFQILTLPTTSEGKAKVQVGRGIKINYIYYWSNSFRDPQIENTSVQIRYDPFNIGIAYAFVRGQWVQCISQYYAELQGRSEKELKLASIELRKHYSNHTQQSKVSAKNLAEFLASVEAQEALLEQRSYDAEVKEVFRVIEGGKATTSRNEEPKLIQVTFANTDFQADEDEAIVPETLVVYEEF

SEQ ID NO: 174 - protein, 414 aa, synthetic construct
  REGION 1..414: note = Synthetic
MYPYDVPDYAPKKKRKVGGSGGGGSGGGGSGGTKSTGFPLELLTRPATERLAYFENYTVAHPRLKEVYEILMRTIAEPAGASFIFVYGASGVGKTTLRLRVEQKLTELALPKLESDRARVPVVGIEAIAPESRYFNWKEYYTRALITLEEPLIDHKFDYGVRGISRDNFGKINVESKVVAPALRRALENALIHRHPDVFFVDEAQHFGKVASGYKLQDQLDCLKSLANMTGILHCLLGTYELLTFRNLSGQLSRRSVDIHFRRYCADSPEDVQAFKSVLLTFQQHLPLAETPNLVDHWEYFYERTLGCIGTLKDWLKRVLSDALDREATTITLKDLQKRALSVAQCQKMFKEIQEGERQLSETEADVQNLRSALGLGAKPIVLPEETPKTTRPPGKVGKRKPKRDPIGVQQDVS

SEQ ID NO: 175 - protein, 360 aa, synthetic construct
  REGION 1..360: note = Synthetic
MTIYSEHWSLNPLEIPQRSRLFSLEPVAVGTPYAESLSSYLHRLAQAHCLTSEKLVMGEIAPLILKDEDKSELLSKNLSHLLGNSDAKPAINGMREMTEKLVTVLEELTMRQDLRFLTLLSWKGMIYDKGLFRNYRAWCPCCCEEWMQKNKTIYEPLSWSFKDVEFCLIHKQRLIEECSHCGARLPVMARLSPAGFCSRCYGWLGQEIKGEEEIEKYRVNIQGISELIALTPQLGYKPIPIELTRKLQLILLVFEQAIGKDVKLLGDLGGIMESLRIASTTNQSQPYHLVKLIIPVCEKAKISVFQLFGSDFKELGKILFGNFSLELKLGGSGGGGSGGGGSGGPKKKRKVYPYDVPDYA

SEQ ID NO: 176 - protein, 493 aa, synthetic construct
  REGION 1..493: note = Synthetic
MLASVLETYESWNLKKPLIPQRSRLYQPQPVGIGTPYIESLTGYITRIAELHGVLPGVLMTREIAPLVNKIYFQNGANRGFREIFNRSQALNGMGEMAADLVQVLQKLTLRDDLRFLTMLFWSNILTPRNLFRTRKAWCPICYQERHQNGLVVYEQLLWTINLITICPQHQKPLVELCPHCNHESPLLNWRSRPGYCSKCGEWLGANQCLKTFTDGEGSIKLQLEWQYWTANVVGELILASQCFESAPSKENITKSLNIVIDKVAENNAAAFSRLIGVPKNSLWMWQSTKTLPELNTLLKICYELEISLVEFLTPKNLITKSFTKISQKHLQLSRTPRVSPKSFDQYQVKDALLAILAGNEEPPPTMEEVGKRLGHHNRTISRHFPDLCSAISAKCRNYNKACRLKSIEKLCSEVREIVLSLNAQGVYPTEGRVCELMPNPGCFRYKQVRAAFNDARREFGLGGSGGGGSGGGGSGGPKKKRKVYPYDVPDYA

SEQ ID NO: 177 - protein, 929 aa, synthetic construct
  REGION 1..929: note = Synthetic
MKEQFEQWVARLQISEAGQKIIEKVRSSEPSRRVGGGSKNVSGRYPSRKMGVTIQFESHRVELPIIYQLEHDKDVLEFYDQPPQIKLDYQASNGRRLGVLHTPDLFVIRTNSAGWEECKTEQDLKKLAEKNPNRYFYSEENNQWHSLPGEVYANQFGLYHRIHSDREINWVLQRNLQFLEDYYRSESLVVEEAIAQSLLAIVSSQPGITLAELLNRSTGAKSDDIYTLIIQEQIYIDLNATPLAEPERCLIFRDEQTASAYRLMVEQPSVSLPAISPVVNIVTGATVSWDGKGLNIIHVGETEVILGAENNQLIELKKAIFENLVRQGKITSLQTPEKTAISTESWQRFHQASPEDQAEALERYKTIEPYLNGHPPENETIPARTIRHWKAKYLIAIQKYGCGYIGLLSHRSVKGNRQRKLPEDTLAIMEKFILEDYETLKQKRMWEVHAALVRACEEAGVIAPSYKAFTKEVQRRTGYEQTKKRQGRRAAYQHESFYWELAITTPRHGDRPFEIGHIDHTELDVELVCSDTGRNLGRPWATFLVDAYSRRLLAVYLTFDSPSYRSCLMVLRICVKRHGRLPQIVVVDNGAEFHSVYFETLLATFECTKKQRPPAKARFGSVCERLFGTSNTQFVHNLLGNTQITRNVRQVTKSVNPKNLAVWTLGLLYEYLCAWAYEVYDTDEHPALFQSPRDAFAAGMAIGGSRVHRMIPYDENFQILTLPTTSEGKAKVQVGRGIKINYIYYWSNSFRDPQIENTSVQIRYDPFNIGIAYAFVRGQWVQCISQYYAELQGRSEKELKLASIELRKHYSNHTQQSKVSAKNLAEFLASVEAQEALLEQRSYDAEVKEVFRVIEGGKATTSRNEEPKLIQVTFANTDFQADEDEAIVPETLVVYEEFGGSGGGGSGGGGSGGPKKKRKVYPYDVPDYA

SEQ ID NO: 178 - protein, 414 aa, synthetic construct
  REGION 1..414: note = Synthetic
MTKSTGFPLELLTRPATERLAYFENYTVAHPRLKEVYEILMRTIAEPAGASFIFVYGASGVGKTTLRLRVEQKLTELALPKLESDRARVPVVGIEAIAPESRYFNWKEYYTRALITLEEPLIDHKFDYGVRGISRDNFGKINVESKVVAPALRRALENALIHRHPDVFFVDEAQHFGKVASGYKLQDQLDCLKSLANMTGILHCLLGTYELLTFRNLSGQLSRRSVDIHFRRYCADSPEDVQAFKSVLLTFQQHLPLAETPNLVDHWEYFYERTLGCIGTLKDWLKRVLSDALDREATTITLKDLQKRALSVAQCQKMFKEIQEGERQLSETEADVQNLRSALGLGAKPIVLPEETPKTTRPPGKVGKRKPKRDPIGVQQDVSGGSGGGGSGGGGSGGPKKKRKVYPYDVPDYA

SEQ ID NO: 179 - DNA, 3815 bp, synthetic construct
  misc_feature 1..3815: note = Synthetic
  source 1..3815: mol_type = other DNA
tcgcgcgtttcggtgatgacggtgaaaacctctgacacatgcagctcccggagacggtcacagcttgtctgtaagcggatgccgggagcagacaagcccgtcagggcgcgtcagcgggtgttggcgggtgtcggggctggcttaactatgcggcatcagagcagattgtactgagagtgcaccatatgcggtgtgaaataccgcacagatgcgtaaggagaaaataccgcatcaggcgccattcgccattcaggctgcgcaactgttgggaagggcgatcggtgcgggcctcttcgctattacgccagctggcgaaagggggatgtgctgcaaggcgattaagttgggtaacgccagggttttcccagtcacgacgttgtaaaacgacggccagtgaattgacgcgtattgggatcaatggctggtactataattcccctggttgctgaagcggtaaaagtgcgtcaactagttttgtgactttacccataactttgccgttactggaaccataactttgccgtcaacaacactacaaccctcattcttgcgtcagctaattttggatgaaattgacagtttggaaccataactttgccgctagtccaaattggaaggataagcttgccgtgagtccaatcaagcatagaaagcaggaaaacgccgaatttttttagaatggagcagaagcgtcgatggagaaaaaaatcactggatataccaccgttgatatatcccaatggcatcgtaaagaacattttgaggcatttcagtcagttgctcaatgtacctataaccagaccgttcagctggatattacggcctttttaaagaccgtaaagaaaaataagcacaagttttatccggcctttattcacattcttgcccgcctgatgaatgctcatccggagttccgtatggcaatgaaagacggtgagctggtgatatgggatagtgttcacccttgttacaccgttttccatgagcaaactgaaacgttttcatcgctctggagtgaataccacgacgatttccggcagtttctacacatatattcgcaagatgtggcgtgttacggtgaaaacctggcctatttccctaaagggtttattgagaatatgtttttcgtctcagccaatccctgggtgagtttcaccagttttgatttaaacgtggccaatatggacaacttcttcgcccccgttttcactatgggcaaatattatacgcaaggcgacaaggtgctgatgccgctggcgattcaggttcatcatgccgtttgtgatggcttccatgtcggcagaatgcttaatgaattacaacagtactgcgatgagtggcagggcggggcgtaacactcacgacgtgagtttggtttgtaagctgttatatgtaaaactagaacagcttatataactggaaccataaccttgccaccctttattggaagcataagcttgccgttgcggcaaagttatgggtaaagtcacatctaagctgtctctagcctttatttactgaatgggcagtaccagactcgaactgatgacaatcccaatggcgcgccgagcttggcgtaatcatggtcatagctgtttcctgtgtgaaattgttatccgctcacaattccacacaacatacgagccggaagcataaagtgtaaagcctggggtgcctaatgagtgagctaactcacattaattgcgttgcgctcactgcccgctttccagtcgggaaacctgtcgtgccagctgcattaatgaatcggccaacgcgcggggagaggcggtttgcgtattgggcgctcttccgcttcctcgctcactgactcgctgcgctcggtcgttcggctgcggcgagcggtatcagctcactcaaaggcggtaatacggttatccacagaatcaggggataacgcaggaaagaacatgtgagcaaaaggccagcaaaaggccaggaaccgtaaaaaggccgcgttgctggcgtttttccataggctccgcccccctgacgagcatcacaaaatcacaaaaatcgacgctcaagtcagaggtggcgaaacccgacaggactataaagataccaggcgtttccccctggaagctccctcgtgcgctctcctgttccgaccctgccgcttaccggatacctgtccgcctttctcccttcgggaagcgtggcgctttctcatagctcacgctgtaggtatctcagttcggtgtaggtcgttcgctccaagctgggctgtgtgcacgaaccccccgttcagcccgaccgctgcgccttatccggtaactatcgtcttgagtccaacccggtaagacacgacttatcgccactggcagcagccactggtaacaggattagcagagcgaggtatgtaggcggtgctacagagttcttgaagtggtggcctaactacggctacactagaagaacagtatttggtatctgcgctctgctgaagccagttaccttcggaaaaagagttggtagctcttgatccggcaaacaaaccaccgctggtagcggtggtttttttgtttgcaagcagcagattacgcgcagaaaaaaaggatctcaagaagatcctttgatcttttctacggggtctgacgctcagtggaacgaaaactcacgttaagggattttggtcatgagattatcaaaaaggatcttcacctagatccttttaaattaaaaatgaagttttaaatcaatctaaagtatatatgagtaaacttggtctgacagttaccaatgcttaatcagtgaggcacctatctcagcgatctgtctatttcgttcatccatagttgcctgactccccgtcgtgtagataactacgatacgggagggcttaccatctggccccagtgctgcaatgataccgcgagacccacgctcaccggctccagatttatcagcaataaaccagccagccggaagggccgagcgcagaagtggtcctgcaactttatccgcctccatccagtctattaattgttgccgggaagctagagtaagtagttcgccagttaatagtttgcgcaacgttgttgccattgctacaggcatcgtggtgtcacgctcgtcgtttggtatggcttcattcagctccggttcccaacgatcaaggcgagttacatgatcccccatgttgtgcaaaaaagcggttagctccttcggtcctccgatcgttgtcagaagtaagttggccgcagtgttatcactcatggttatggcagcactgcataattctcttactgtcatgccatccgtaagatgcttttctgtgactggtgagtactcaaccaagtcattctgagaatagtgtatgcggcgaccgagttgctcttgcccggcgtcaatacgggataataccgcgccacatagcagaactttaaaagtgctcatcattggaaaacgttcttcggggcgaaaactctcaaggatcttaccgctgttgagatccagttcgatgtaacccactcgtgcacccaactgatcttcagcatcttttactttcaccagcgtttctgggtgagcaaaaacaggaaggcaaaatgccgcaaaaaagggaataagggcgacacggaaatgttgaatactcatactcttcctttttcaatattattgaagcatttatcagggttattgtctcatgagcggatacatatttgaatgtatttagaaaaataaacaaataggggttccgcgcacatttccccgaaaagtgccacctgacgtctaagaaaccattattatcatgacattaacctataaaaataggcgtatcacgaggccctttcgtc

SEQ ID NO: 180 - DNA, 3018 bp, synthetic construct
  misc_feature 1..3018: note = Synthetic
  source 1..3018: mol_type = other DNA
aattctgtggaatgtgtgtcagttagggtgtggaaagtccccaggctccccagcaggcagaagtatgcaaagcatgcatctcaattagtcagcaaccaggtgtggaaagtccccaggctccccagcaggcagaagtatgcaaagcatgcatctcaattagtcagcaaccatagtcccgcccctaactccgcccatcccgcccctaactccgcccagttccgcccattctccgccccatggctgactaattttttttatttatgcagaggccgaggccgcctctgcctctgagctattccagaagtagtgaggaggcttttttggaggcctaggcttttgcaaaaagctaacttgtttattgcagcttataatggttacaaataaagcaatagcatcacaaatttcacaaataaagcatttttttcactgcattctagttgtggtttgtccaaactcatcaatgtatcttatcatgtctgtataccgtcgacctctagctagagcttggcgtaatcatggtcatagctgtttcctgtgtgaaattgttatccgctcacaattccacacaacatacgagccggaagcataaagtgtaaagcctggggtgcctaatgagtgagctaactcacattaattgcgttgcgctcactgcccgctttccagtcgggaaacctgtcgtgccagctgcattaatgaatcggccaacgcgcggggagaggcggtttgcgtattgggcgctcttccgcttcctcgctcactgactcgctgcgctcggtcgttcggctgcggcgagcggtatcagctcactcaaaggcggtaatacggttatccacagaatcaggggataacgcaggaaagaacatgtgagcaaaaggccagcaaaaggccaggaaccgtaaaaaggccgcgttgctggcgtttttccataggctccgcccccctgacgagcatcacaaaaatcgacgctcaagtcagaggtggcgaaacccgacaggactataaagataccaggcgtttccccctggaagctccctcgtgcgctctcctgttccgaccctgccgcttaccggatacctgtccgcctttctcccttcgggaagcgtggcgctttctcatagctcacgctgtaggtatctcagttcggtgtaggtcgttcgctccaagctgggctgtgtgcacgaaccccccgttcagcccgaccgctgcgccttatccggtaactatcgtcttgagtccaacccggtaagacacgacttatcgccactggcagcagccactggtaacaggattagcagagcgaggtatgtaggcggtgctacagagttcttgaagtggtggcctaactacggctacactagaagaacagtatttggtatctgcgctctgctgaagccagttaccttcggaaaaagagttggtagctcttgatccggcaaacaaaccaccgctggtagcggtttttttgtttgcaagcagcagattacgcgcagaaaaaaaggatctcaagaagatcctttgatcttttctacggggtctgacgctcagtggaacgaaaactcacgttaagggattttggtcatgagattatcaaaaaggatcttcacctagatccttttaaattaaaaatgaagttttaaatcaatctaaagtatatatgagtaaacttggtctgacagttaccaatgcttaatcagtgaggcacctatctcagcgatctgtctatttcgttcatccatagttgcctgactccccgtcgtgtagataactacgatacgggagggcttaccatctggccccagtgctgcaatgataccgcgagacccacgctcaccggctccagatttatcagcaataaaccagccagccggaagggccgagcgcagaagtggtcctgcaactttatccgcctccatccagtctattaattgttgccgggaagctagagtaagtagttcgccagttaatagtttgcgcaacgttgttgccattgctacaggcatcgtggtgtcacgctcgtcgtttggtatggcttcattcagctccggttcccaacgatcaaggcgagttacatgatcccccatgttgtgcaaaaaagcggttagctccttcggtcctccgatcgttgtcagaagtaagttggccgcagtgttatcactcatggttatggcagcactgcataattctcttactgtcatgccatccgtaagatgcttttctgtgactggtgagtactcaaccaagtcattctgagaatagtgtatgcggcgaccgagttgctcttgcccggcgtcaatacgggataataccgcgccacatagcagaactttaaaagtgctcatcattggaaaacgttcttcggggcgaaaactctcaaggatcttaccgctgttgagatccagttcgatgtaacccactcgtgcacccaactgatcttcagcatcttttactttcaccagcgtttctgggtgagcaaaaacaggaaggcaaaatgccgcaaaaaagggaataagggcgacacggaaatgttgaatactcatactcttcctttttcaatattattgaagcatttatcagggttattgtctcatgagcggatacatatttgaatgtatttagaaaaataaacaaataggggttccgcgcacatttccccgaaaagtgccacctgagggcctatttcccatgattccttcatatttgcatatacgatacaaggctgttagagagataattagaattaatttgactgtaaacacaaagatattagtacaaaatacgtgacgtagaaagtaataatttcttgggtagtttgcagttttaaaattatgttttaaaatggactatcatatgcttaccgtaacttgaaagtatttcgatttcttggctttatatatcttgtggaaaggacgtgagtcgtggctttatgccgttaggcgttgcaaccatctatgtatagctacgatggaatagtaaagggtgagtcgtggctttatgccgttaggcgttgctcaatttttt

SEQ ID NO: 181 - DNA, 3018 bp, synthetic construct
  misc_feature 1..3018: note = Synthetic
  source 1..3018: mol_type = other DNA
aattctgtggaatgtgtgtcagttagggtgtggaaagtccccaggctccccagcaggcagaagtatgcaaagcatgcatctcaattagtcagcaaccaggtgtggaaagtccccaggctccccagcaggcagaagtatgcaaagcatgcatctcaattagtcagcaaccatagtcccgcccctaactccgcccatcccgcccctaactccgcccagttccgcccattctccgccccatggctgactaattttttttatttatgcagaggccgaggccgcctctgcctctgagctattccagaagtagtgaggaggcttttttggaggcctaggcttttgcaaaaagctaacttgtttattgcagcttataatggttacaaataaagcaatagcatcacaaatttcacaaataaagcatttttttcactgcattctagttgtggtttgtccaaactcatcaatgtatcttatcatgtctgtataccgtcgacctctagctagagcttggcgtaatcatggtcatagctgtttcctgtgtgaaattgttatccgctcacaattccacacaacatacgagccggaagcataaagtgtaaagcctggggtgcctaatgagtgagctaactcacattaattgcgttgcgctcactgcccgctttccagtcgggaaacctgtcgtgccagctgcattaatgaatcggccaacgcgcggggagaggcggtttgcgtattgggcgctcttccgcttcctcgctcactgactcgctgcgctcggtcgttcggctgcggcgagcggtatcagctcactcaaaggcggtaatacggttatccacagaatcaggggataacgcaggaaagaacatgtgagcaaaaggccagcaaaaggccaggaaccgtaaaaaggccgcgttgctggcgtttttccataggctccgcccccctgacgagcatcacaaaaatcgacgctcaagtcagaggtggcgaaacccgacaggactataaagataccaggcgtttccccctggaagctccctcgtgcgctctcctgttccgaccctgccgcttaccggatacctgtccgcctttctcccttcgggaagcgtggcgctttctcatagctcacgctgtaggtatctcagttcggtgtaggtcgttcgctccaagctgggctgtgtgcacgaaccccccgttcagcccgaccgctgcgccttatccggtaactatcgtcttgagtccaacccggtaagacacgacttatcgccactggcagcagccactggtaacaggattagcagagcgaggtatgtaggcggtgctacagagttcttgaagtggtggcctaactacggctacactagaagaacagtatttggtatctgcgctctgctgaagccagttaccttcggaaaaagagttggtagctcttgatccggcaaacaaaccaccgctggtagcggtttttttgtttgcaagcagcagattacgcgcagaaaaaaaggatctcaagaagatcctttgatcttttctacggggtctgacgctcagtggaacgaaaactcacgttaagggattttggtcatgagattatcaaaaaggatcttcacctagatccttttaaattaaaaatgaagttttaaatcaatctaaagtatatatgagtaaacttggtctgacagttaccaatgcttaatcagtgaggcacctatctcagcgatctgtctatttcgttcatccatagttgcctgactccccgtcgtgtagataactacgatacgggagggcttaccatctggccccagtgctgcaatgataccgcgagacccacgctcaccggctccagatttatcagcaataaaccagccagccggaagggccgagcgcagaagtggtcctgcaactttatccgcctccatccagtctattaattgttgccgggaagctagagtaagtagttcgccagttaatagtttgcgcaacgttgttgccattgctacaggcatcgtggtgtcacgctcgtcgtttggtatggcttcattcagctccggttcccaacgatcaaggcgagttacatgatcccccatgttgtgcaaaaaagcggttagctccttcggtcctccgatcgttgtcagaagtaagttggccgcagtgttatcactcatggttatggcagcactgcataattctcttactgtcatgccatccgtaagatgcttttctgtgactggtgagtactcaaccaagtcattctgagaatagtgtatgcggcgaccgagttgctcttgcccggcgtcaatacgggataataccgcgccacatagcagaactttaaaagtgctcatcattggaaaacgttcttcggggcgaaaactctcaaggatcttaccgctgttgagatccagttcgatgtaacccactcgtgcacccaactgatcttcagcatcttttactttcaccagcgtttctgggtgagcaaaaacaggaaggcaaaatgccgcaaaaaagggaataagggcgacacggaaatgttgaatactcatactcttcctttttcaatattattgaagcatttatcagggttattgtctcatgagcggatacatatttgaatgtatttagaaaaataaacaaataggggttccgcgcacatttccccgaaaagtgccacctgagggcctatttcccatgattccttcatatttgcatatacgatacaaggctgttagagagataattagaattaatttgactgtaaacacaaagatattagtacaaaatacgtgacgtagaaagtaataatttcttgggtagtttgcagttttaaaattatgttttaaaatggactatcatatgcttaccgtaacttgaaagtatttcgatttcttggctttatatatcttgtggaaaggacgtgagtcgtggctttatgccgttaggcgttgcagagaagtcatttaataaggccactgttaaacgtaggtgagtcgtggctttatgccgttaggcgttgctcaatttttt

SEQ ID NO: 182 - DNA, 4445 bp, synthetic construct
  misc_feature 1..4445: note = Synthetic
  source 1..4445: mol_type = other DNA
cgttacataacttacggtaaatggcccgcctggctgaccgcccaacgacccccgcccattgacgtcaataatgacgtatgttcccatagtaacgccaatagggactttccattgacgtcaatgggtggagtatttacggtaaactgcccacttggcagtacatcaagtgtatcatatgccaagtacgccccctattgacgtcaatgacggtaaatggcccgcctggcattatgcccagtacatgaccttatgggactttcctacttggcagtacatctacgtattagtcatcgctattaccatggtgatgcggttttggcagtacatcaatgggcgtggatagcggtttgactcacggggatttccaagtctccaccccattgacgtcaatgggagtttgttttggcaccaaaatcaacgggactttccaaaatgtcgtaacaactccgccccattgacgcaaatgggcggtaggcgtgtacggtgggaggtctatataagcagagctggtttagtgaaccgtcagatccgctagcgctaccggactcagatcgccaccatgtacccctacgacgtgccagactacgcccctaagaagaagagaaaagtcggcggctctggcggcggaggatctggcggaggtggaagcggaggaatcgcccctctgatcctgtacctggacgtgcccttcaccaccttcagagagtctcacgccagagagatgggcaagacataccccgttcctccaccagccacagtgtacggcatgctgctgtctctcgtgggcgagacaaacgtgtacagacactgcggcgtggaactggccattgccatgctgagcagccccaagaagtcccggatcctgcggcagatgcggagattcaagaacgccgacttctctcaccccgagaacgtgatcccttgctaccaagagatcctgagcaacctgaagtgcctgatctgggtccgaagcgacgaggaaaagatccagcctagcctgagagagcggatccagctggcctttgatcaccctgaactcgtcagaagattcggctgcctgttcctgggcgagagcgaccagctgatcaagaccatcaagctggccagagaggactacctggaaggcgttagacagtgggccatccgggacaacagaggcagactgacactgccctattgggtcgaccacgtgggcagcagaaatacccggttcctgagataccggatcgaggaaatggaccggctgagccctcctgacctggcttggacaatggtgcagagccccatctgactagcataaccccttggggcgcactcctcaggtgcaggctgcctatcagaaggtggtggctggtgtggccaatgccctggctcacaaataccactgagatctttttccctctgccaaaaattatggggacatcatgaagccccttgagcatctgacttctggctaataaaggaaatttattttcattgcaatagtgtgttggaattttttgtgtctctcactcggaaggacatatgggagggcaaatcatttaaaacatcagaatgagtatttggtttagagtttggcaacatatgcccatatgctggctgccatgaacaaaggttggctataaagaggtcatcagtatatgaaacagccccctgctgtccattccttattccatagaaaagccttgacttgaggttagattttttttatattttgttttgtgttatttttttctttaacatccctaaaattttccttacatgttttactagccagatttttcctcctctcctgactactcccagtcatagctgtccctcttctcttatggagatccctcgacctgcagcccaagcttggcgtaatcatggtcatagctgtttcctgtgtgaaattgttatccgctcacaattccacacaacatacgagccggaagcataaagtgtaaagcctggggtgcctaatgagtgagctaactcacattaattgcgttgcgctcactgcccgctttccagtcgggaaacctgtcgtgccagcggatccgcatctcaattagtcagcaaccatagtcccgcccctaactccgcccatcccgcccctaactccgcccagttccgcccattctccgccccatggctgactaattttttttatttatgcagaggccgaggccgcctcggcctctgagctattccagaagtagtgaggaggcttttttggaggcctaggcttttgcaaaaagctaacttgtttattgcagcttataatggttacaaataaagcaatagcatcacaaatttcacaaataaagcatttttttcactgcattctagttgtggtttgtccaaactcatcaatgtatcttatcatgtctggatccgctgcattaatgaatcggccaacgcgcggggagaggcggtttgcgtattgggcgctcttccgcttcctcgctcactgactcgctgcgctcggtcgttcggctgcggcgagcggtatcagctcactcaaaggcggtaatacggttatccacagaatcaggggataacgcaggaaagaacatgtgagcaaaaggccagcaaaaggccaggaaccgtaaaaaggccgcgttgctggcgtttttccataggctccgcccccctgacgagcatcacaaaaatcgacgctcaagtcagaggtggcgaaacccgacaggactataaagataccaggcgtttccccctggaagctccctcgtgcgctctcctgttccgaccctgccgcttaccggatacctgtccgcctttctcccttcgggaagcgtggcgctttctcatagctcacgctgtaggtatctcagttcggtgtaggtcgttcgctccaagctgggctgtgtgcacgaaccccccgttcagcccgaccgctgcgccttatccggtaactatcgtcttgagtccaacccggtaagacacgacttatcgccactggcagcagccactggtaacaggattagcagagcgaggtatgtaggcggtgctacagagttcttgaagtggtggcctaactacggctacactagaagaacagtatttggtatctgcgctctgctgaagccagttaccttcggaaaaagagttggtagctcttgatccggcaaacaaaccaccgctggtagcggtggtttttttgtttgcaagcagcagattacgcgcagaaaaaaaggatctcaagaagatcctttgatcttttctacggggtctgacgctcagtggaacgaaaactcacgttaagggattttggtcatgagattatcaaaaaggatcttcacctagatccttttaaattaaaaatgaagttttaaatcaatctaaagtatatatgagtaaacttggtctgacagttaccaatgcttaatcagtgaggcacctatctcagcgatctgtctatttcgttcatccatagttgcctgactccccgtcgtgtagataactacgatacgggagggcttaccatctggccccagtgctgcaatgataccgcgagacccacgctcaccggctccagatttatcagcaataaaccagccagccggaagggccgagcgcagaagtggtcctgcaactttatccgcctccatccagtctattaattgttgccgggaagctagagtaagtagttcgccagttaatagtttgcgcaacgttgttgccattgctacaggcatcgtggtgtcacgctcgtcgtttggtatggcttcattcagctccggttcccaacgatcaaggcgagttacatgatcccccatgttgtgcaaaaaagcggttagctccttcggtcctccgatcgttgtcagaagtaagttggccgcagtgttatcactcatggttatggcagcactgcataattctcttactgtcatgccatccgtaagatgcttttctgtgactggtgagtactcaaccaagtcattctgagaatagtgtatgcggcgaccgagttgctcttgcccggcgtcaatacgggataataccgcgccacatagcagaactttaaaagtgctcatcattggaaaacgttcttcggggcgaaaactctcaaggatcttaccgctgttgagatccagttcgatgtaacccactcgtgcacccaactgatcttcagcatcttttactttcaccagcgtttctgggtgagcaaaaacaggaaggcaaaatgccgcaaaaaagggaataagggcgacacggaaatgttgaatactcatactcttcctttttcaatattattgaagcatttatcagggttattgtctcatgagcggatacatatttgaatgtatttagaaaaataaacaaataggggttccgcgcacatttccccgaaaagtgccacctgggtcgacattgattattgactagtaatagtaatcaattacggggtcattagttcatagcccatatatggagttccg

SEQ ID NO: 183 - DNA, 4469 bp, synthetic construct
  misc_feature 1..4469: note = Synthetic
  source 1..4469: mol_type = other DNA
cgttacataacttacggtaaatggcccgcctggctgaccgcccaacgacccccgcccattgacgtcaataatgacgtatgttcccatagtaacgccaatagggactttccattgacgtcaatgggtggagtatttacggtaaactgcccacttggcagtacatcaagtgtatcatatgccaagtacgccccctattgacgtcaatgacggtaaatggcccgcctggcattatgcccagtacatgaccttatgggactttcctacttggcagtacatctacgtattagtcatcgctattaccatggtgatgcggttttggcagtacatcaatgggcgtggatagcggtttgactcacggggatttccaagtctccaccccattgacgtcaatgggagtttgttttggcaccaaaatcaacgggactttccaaaatgtcgtaacaactccgccccattgacgcaaatgggcggtaggcgtgtacggtgggaggtctatataagcagagctggtttagtgaaccgtcagatccgctagcgctaccggactcagatcgccaccatgtacccctacgacgtgccagactacgcccctaagaagaagagaaaagtcggcggctctggcggcggaggatctggcggaggtggaagcggaggaaccgccatcctgatccagagcgaggaatacgtggacctgaccttcaagctgagaggcgcccctattcctctggacaacggctacctgacatacgccgctctgagcagaatctgccctcctctgcacgaactgaagtccatcggcattcaccctatcgccggcattcccaccagaaacaacctgctggaactgacagcccagagccggctgaagatcagaatctaccaccagcagatccctctgatctacccctacctggccggacaggcctttcacatcggccagaacttctaccagctggacatccccgactacaagcccctgatcagcagcgagagcgtgtacagcagactggtcatcatcaagggcttccaggacagcaccaacttcatcgaggccgtgcagcggcagatggacaatctgggaatccagggcaagatcgagctgctgaccagacaggatggcacccctcagagaaggcagctgaccatcaacaaagagggcaagcagttcaaagtgcgcggcttcggcgtgaagatctccgagctgaaccctgaggacagcctgacactgcaagagcaaggcatcggcggcaagcggaagatgatgtgcggcatctttgtgcccgccaccagatccaaagaggaagaggaaacctgactagcataaccccttggggcgcactcctcaggtgcaggctgcctatcagaaggtggtggctggtgtggccaatgccctggctcacaaataccactgagatctttttccctctgccaaaaattatggggacatcatgaagccccttgagcatctgacttctggctaataaaggaaatttattttcattgcaatagtgtgttggaattttttgtgtctctcactcggaaggacatatgggagggcaaatcatttaaaacatcagaatgagtatttggtttagagtttggcaacatatgcccatatgctggctgccatgaacaaaggttggctataaagaggtcatcagtatatgaaacagccccctgctgtccattccttattccatagaaaagccttgacttgaggttagattttttttatattttgttttgtgttatttttttctttaacatccctaaaattttccttacatgttttactagccagatttttcctcctctcctgactactcccagtcatagctgtccctcttctcttatggagatccctcgacctgcagcccaagcttggcgtaatcatggtcatagctgtttcctgtgtgaaattgttatccgctcacaattccacacaacatacgagccggaagcataaagtgtaaagcctggggtgcctaatgagtgagctaactcacattaattgcgttgcgctcactgcccgctttccagtcgggaaacctgtcgtgccagcggatccgcatctcaattagtcagcaaccatagtcccgcccctaactccgcccatcccgcccctaactccgcccagttccgcccattctccgccccatggctgactaattttttttatttatgcagaggccgaggccgcctcggcctctgagctattccagaagtagtgaggaggcttttttggaggcctaggcttttgcaaaaagctaacttgtttattgcagcttataatggttacaaataaagcaatagcatcacaaatttcacaaataaagcatttttttcactgcattctagttgtggtttgtccaaactcatcaatgtatcttatcatgtctggatccgctgcattaatgaatcggccaacgcgcggggagaggcggtttgcgtattgggcgctcttccgcttcctcgctcactgactcgctgcgctcggtcgttcggctgcggcgagcggtatcagctcactcaaaggcggtaatacggttatccacagaatcaggggataacgcaggaaagaacatgtgagcaaaaggccagcaaaaggccaggaaccgtaaaaaggccgcgttgctggcgtttttccataggctccgcccccctgacgagcatcacaaaaatcgacgctcaagtcagaggtggcgaaacccgacaggactataaagataccaggcgtttccccctggaagctccctcgtgcgctctcctgttccgaccctgccgcttaccggatacctgtccgcctttctcccttcgggaagcgtggcgctttctcatagctcacgctgtaggtatctcagttcggtgtaggtcgttcgctccaagctgggctgtgtgcacgaaccccccgttcagcccgaccgctgcgccttatccggtaactatcgtcttgagtccaacccggtaagacacgacttatcgccactggcagcagccactggtaacaggattagcagagcgaggtatgtaggcggtgctacagagttcttgaagtggtggcctaactacggctacactagaagaacagtatttggtatctgcgctctgctgaagccagttaccttcggaaaaagagttggtagctcttgatccggcaaacaaaccaccgctggtagcggtggtttttttgtttgcaagcagcagattacgcgcagaaaaaaaggatctcaagaagatcctttgatcttttctacggggtctgacgctcagtggaacgaaaactcacgttaagggattttggtcatgagattatcaaaaaggatcttcacctagatccttttaaattaaaaatgaagttttaaatcaatctaaagtatatatgagtaaacttggtctgacagttaccaatgcttaatcagtgaggcacctatctcagcgatctgtctatttcgttcatccatagttgcctgactccccgtcgtgtagataactacgatacgggagggcttaccatctggccccagtgctgcaatgataccgcgagacccacgctcaccggctccagatttatcagcaataaaccagccagccggaagggccgagcgcagaagtggtcctgcaactttatccgcctccatccagtctattaattgttgccgggaagctagagtaagtagttcgccagttaatagtttgcgcaacgttgttgccattgctacaggcatcgtggtgtcacgctcgtcgtttggtatggcttcattcagctccggttcccaacgatcaaggcgagttacatgatcccccatgttgtgcaaaaaagcggttagctccttcggtcctccgatcgttgtcagaagtaagttggccgcagtgttatcactcatggttatggcagcactgcataattctcttactgtcatgccatccgtaagatgcttttctgtgactggtgagtactcaaccaagtcattctgagaatagtgtatgcggcgaccgagttgctcttgcccggcgtcaatacgggataataccgcgccacatagcagaactttaaaagtgctcatcattggaaaacgttcttcggggcgaaaactctcaaggatcttaccgctgttgagatccagttcgatgtaacccactcgtgcacccaactgatcttcagcatcttttactttcaccagcgtttctgggtgagcaaaaacaggaaggcaaaatgccgcaaaaaagggaataagggcgacacggaaatgttgaatactcatactcttcctttttcaatattattgaagcatttatcagggttattgtctcatgagcggatacatatttgaatgtatttagaaaaataaacaaataggggttccgcgcacatttccccgaaaagtgccacctgggtcgacattgattattgactagtaatagtaatcaattacggggtcattagttcatagcccatatatggagttccg

SEQ ID NO: 184 - DNA, 4778 bp, synthetic construct
  misc_feature 1..4778: note = Synthetic
  source 1..4778: mol_type = other DNA
cgttacataacttacggtaaatggcccgcctggctgaccgcccaacgacccccgcccattgacgtcaataatgacgtatgttcccatagtaacgccaatagggactttccattgacgtcaatgggtggagtatttacggtaaactgcccacttggcagtacatcaagtgtatcatatgccaagtacgccccctattgacgtcaatgacggtaaatggcccgcctggcattatgcccagtacatgaccttatgggactttcctacttggcagtacatctacgtattagtcatcgctattaccatggtgatgcggttttggcagtacatcaatgggcgtggatagcggtttgactcacggggatttccaagtctccaccccattgacgtcaatgggagtttgttttggcaccaaaatcaacgggactttccaaaatgtcgtaacaactccgccccattgacgcaaatgggcggtaggcgtgtacggtgggaggtctatataagcagagctggtttagtgaaccgtcagatccgctagcgctaccggactcagatcgccaccatgtacccctacgacgtgccagactacgcccctaagaagaagagaaaagtcggcggctctggcggcggaggatctggcggaggtggaagcggaggaatgacccagaagaagaacgacagcaacatccccaactactacctgtacggcaccgtgctgaccagatacggactggccagcctgaaccacgacatcagaagaggcaacaagaccatcctgcagaaaggctactggaacaacggcaagatccacagcttcgtgggcagcagcgccattagatgggccctgaggttctatctgcagaaacagggctacctggtcaacagagtgtgggacgaagaggaacacatcaacagactgaccagcgaggacttcgaccccgagaagttctacgacgacgacatcttcggcttcgccctgctggaaagcgccgagacagaggaagataccagcaccaccaagcggaagaagaagcagaccaagaccagcacacccaaccagagaatgggcgccctgggcatgaatatggccgtgtctctgaccccttacgatggcgccgtgaagctgggagccaagtctggcagagagaaggacagcaccagcctgcacttcaccgagtaccacgccaccagataccagtactacttcggcatcgacgccacacacctgaaggacttcagccggatcctgcctatgatcgacggcatcatgaacctgcctaaagtcggcggcagcagcaatatcttcaactaccctttctgccccgacagcctggtgttccagtggaccaatcacttcgccagctacatcagctactgcttcgagtactgcgaccccaagagcaaagaggccaagctgagccaagagttcatcgacgaggtggaatgcggccagatcgaccctagcaaactgtggatcggcggcaccatcgtgaaggacctgcagcagctggacaacttcgagagcagccctctgaacaaggcccacatctaccggaaccggaacgagatgatcgaggccctgaaaaccgtgatcaagcgcgacctgggcctcgaggaatccaagtaactagcataaccccttggggcgcactcctcaggtgcaggctgcctatcagaaggtggtggctggtgtggccaatgccctggctcacaaataccactgagatctttttccctctgccaaaaattatggggacatcatgaagccccttgagcatctgacttctggctaataaaggaaatttattttcattgcaatagtgtgttggaattttttgtgtctctcactcggaaggacatatgggagggcaaatcatttaaaacatcagaatgagtatttggtttagagtttggcaacatatgcccatatgctggctgccatgaacaaaggttggctataaagaggtcatcagtatatgaaacagccccctgctgtccattccttattccatagaaaagccttgacttgaggttagattttttttatattttgttttgtgttatttttttctttaacatccctaaaattttccttacatgttttactagccagatttttcctcctctcctgactactcccagtcatagctgtccctcttctcttatggagatccctcgacctgcagcccaagcttggcgtaatcatggtcatagctgtttcctgtgtgaaattgttatccgctcacaattccacacaacatacgagccggaagcataaagtgtaaagcctggggtgcctaatgagtgagctaactcacattaattgcgttgcgctcactgcccgctttccagtcgggaaacctgtcgtgccagcggatccgcatctcaattagtcagcaaccatagtcccgcccctaactccgcccatcccgcccctaactccgcccagttccgcccattctccgccccatggctgactaattttttttatttatgcagaggccgaggccgcctcggcctctgagctattccagaagtagtgaggaggcttttttggaggcctaggcttttgcaaaaagctaacttgtttattgcagcttataatggttacaaataaagcaatagcatcacaaatttcacaaataaagcatttttttcactgcattctagttgtggtttgtccaaactcatcaatgtatcttatcatgtctggatccgctgcattaatgaatcggccaacgcgcggggagaggcggtttgcgtattgggcgctcttccgcttcctcgctcactgactcgctgcgctcggtcgttcggctgcggcgagcggtatcagctcactcaaaggcggtaatacggttatccacagaatcaggggataacgcaggaaagaacatgtgagcaaaaggccagcaaaaggccaggaaccgtaaaaaggccgcgttgctggcgtttttccataggctccgcccccctgacgagcatcacaaaaatcgacgctcaagtcagaggtggcgaaacccgacaggactataaagataccaggcgtttccccctggaagctccctcgtgcgctctcctgttccgaccctgccgcttaccggatacctgtccgcctttctcccttcgggaagcgtggcgctttctcatagctcacgctgtaggtatctcagttcggtgtaggtcgttcgctccaagctgggctgtgtgcacgaaccccccgttcagcccgaccgctgcgccttatccggtaactatcgtcttgagtccaacccggtaagacacgacttatcgccactggcagcagccactggtaacaggattagcagagcgaggtatgtaggcggtgctacagagttcttgaagtggtggcctaactacggctacactagaagaacagtatttggtatctgcgctctgctgaagccagttaccttcggaaaaagagttggtagctcttgatccggcaaacaaaccaccgctggtagcggtggtttttttgtttgcaagcagcagattacgcgcagaaaaaaaggatctcaagaagatcctttgatcttttctacggggtctgacgctcagtggaacgaaaactcacgttaagggattttggtcatgagattatcaaaaaggatcttcacctagatccttttaaattaaaaatgaagttttaaatcaatctaaagtatatatgagtaaacttggtctgacagttaccaatgcttaatcagtgaggcacctatctcagcgatctgtctatttcgttcatccatagttgcctgactccccgtcgtgtagataactacgatacgggagggcttaccatctggccccagtgctgcaatgataccgcgagacccacgctcaccggctccagatttatcagcaataaaccagccagccggaagggccgagcgcagaagtggtcctgcaactttatccgcctccatccagtctattaattgttgccgggaagctagagtaagtagttcgccagttaatagtttgcgcaacgttgttgccattgctacaggcatcgtggtgtcacgctcgtcgtttggtatggcttcattcagctccggttcccaacgatcaaggcgagttacatgatcccccatgttgtgcaaaaaagcggttagctccttcggtcctccgatcgttgtcagaagtaagttggccgcagtgttatcactcatggttatggcagcactgcataattctcttactgtcatgccatccgtaagatgcttttctgtgactggtgagtactcaaccaagtcattctgagaatagtgtatgcggcgaccgagttgctcttgcccggcgtcaatacgggataataccgcgccacatagcagaactttaaaagtgctcatcattggaaaacgttcttcggggcgaaaactctcaaggatcttaccgctgttgagatccagttcgatgtaacccactcgtgcacccaactgatcttcagcatcttttactttcaccagcgtttctgggtgagcaaaaacaggaaggcaaaatgccgcaaaaaagggaataagggcgacacggaaatgttgaatactcatactcttcctttttcaatattattgaagcatttatcagggttattgtctcatgagcggatacatatttgaatgtatttagaaaaataaacaaataggggttccgcgcacatttccccgaaaagtgccacctgggtcgacattgattattgactagtaatagtaatcaattacggggtcattagttcatagcccatatatggagttccg

SEQ ID NO: 185 - DNA, 5387 bp, synthetic construct
  misc_feature 1..5387: note = Synthetic
  source 1..5387: mol_type = other DNA
cgttacataacttacggtaaatggcccgcctggctgaccgcccaacgacccccgcccattgacgtcaataatgacgtatgttcccatagtaacgccaatagggactttccattgacgtcaatgggtggagtatttacggtaaactgcccacttggcagtacatcaagtgtatcatatgccaagtacgccccctattgacgtcaatgacggtaaatggcccgcctggcattatgcccagtacatgaccttatgggactttcctacttggcagtacatctacgtattagtcatcgctattaccatggtgatgcggttttggcagtacatcaatgggcgtggatagcggtttgactcacggggatttccaagtctccaccccattgacgtcaatgggagtttgttttggcaccaaaatcaacgggactttccaaaatgtcgtaacaactccgccccattgacgcaaatgggcggtaggcgtgtacggtgggaggtctatataagcagagctggtttagtgaaccgtcagatccgctagcgctaccggactcagatcgccaccatgtacccctacgacgtgccagactacgcccctaagaagaagagaaaagtcggcggctctggcggcggaggatctggcggaggtggaagcggaggaatcgtgtccacacagcccaagatcagcctgtctctgcacgccgccgataccaccatcatgcacagagtgggcatgaccggcctgtacatgaccctgaagcggctggaaaagcagtaccctctgagcagacagagaggcggccacatcagctggtttctgaccgccgacaccatcgagctgttttgggagggcagcgactttatcgccctgagctggctgatcaacgagagctttcagctggacgacaccggcctgatccacctcgttggcctggacaacgaccggatcgacctgagacagaagatccacatccacgagggaatctgcggcgtgttcctgcggctgaacaagttttaccaggccggcgagatcatcaacaccgagctgagattcgaagagaagcaggtcgagtaccagtacaagagcctgacttggtacgcccaccagaccttcgccgagaagctgtgcgaagccgatacacagcagctgcggcacgactacatccagatcaccagctggctgtacctcggcggaattgtgcggcatgccagaacacagaacaccaccaagctggaagagaaacccgagtacgccctggctctgctgtttgtgcctgtcgtgtgccactactgcctgctgcacatccctagcgaggacctgaaagagcggaagccccacagatacctggtggtcatccccgagatcaaggacttcgaggatgccagccagagaagatggcggctgcagcagctggaaacaaagcagttccacgtgtccagcctgggcgaagccggcctgctgtactacagcctggatgacattcagcccgaggtggcctactaccaggcctgtcaagtgtggctgtacgaaaagaccaacaaggccagccggcagcggaccctgatgagcatcgaggaaatcaagatcgacaagaacatcctcatcacctaccagcaggtccagaagtactttaagaccaactaccagatcattaagtacaagcagatcttcatcaaagtgaaccccattcggagcctgatcgccgacaatctggtcaagggaatccactggtggtccaatttctgggagaagctggtcatcgaggacagcaaagagtacctgttcaaccagctgttcagcaaccgcgagggcttcatcatcatggccgagaacagcgaagaggacaagcagtatctgatctttatcaaggtgttccagcaggccatgaagggcaacttcgccaagatctacgccaagaccgaggaaggcaaggaccctcctatcaagaaaaaggtggaacggctgcgggccgagctgaactactgttacgatgagctgagcttcaaagaatacctgagcgacttcctcgtcagaggcggactgaacaaatacttcaacgagcaccaagaggaaatcgccctgctgatcaagaagtccccttggcaagagatcagaatctggtccctgctggccattgccagctacaagcccaaggacaagctgaccaaccgggacgatagcagcctgagcaacaaccagaaactggaagaagtgaacgacgacagcgaggaagagtgactagcataaccccttggggcgcactcctcaggtgcaggctgcctatcagaaggtggtggctggtgtggccaatgccctggctcacaaataccactgagatctttttccctctgccaaaaattatggggacatcatgaagccccttgagcatctgacttctggctaataaaggaaatttattttcattgcaatagtgtgttggaattttttgtgtctctcactcggaaggacatatgggagggcaaatcatttaaaacatcagaatgagtatttggtttagagtttggcaacatatgcccatatgctggctgccatgaacaaaggttggctataaagaggtcatcagtatatgaaacagccccctgctgtccattccttattccatagaaaagccttgacttgaggttagattttttttatattttgttttgtgttatttttttctttaacatccctaaaattttccttacatgttttactagccagatttttcctcctctcctgactactcccagtcatagctgtccctcttctcttatggagatccctcgacctgcagcccaagcttggcgtaatcatggtcatagctgtttcctgtgtgaaattgttatccgctcacaattccacacaacatacgagccggaagcataaagtgtaaagcctggggtgcctaatgagtgagctaactcacattaattgcgttgcgctcactgcccgctttccagtcgggaaacctgtcgtgccagcggatccgcatctcaattagtcagcaaccatagtcccgcccctaactccgcccatcccgcccctaactccgcccagttccgcccattctccgccccatggctgactaattttttttatttatgcagaggccgaggccgcctcggcctctgagctattccagaagtagtgaggaggcttttttggaggcctaggcttttgcaaaaagctaacttgtttattgcagcttataatggttacaaataaagcaatagcatcacaaatttcacaaataaagcatttttttcactgcattctagttgtggtttgtccaaactcatcaatgtatcttatcatgtctggatccgctgcattaatgaatcggccaacgcgcggggagaggcggtttgcgtattgggcgctcttccgcttcctcgctcactgactcgctgcgctcggtcgttcggctgcggcgagcggtatcagctcactcaaaggcggtaatacggttatccacagaatcaggggataacgcaggaaagaacatgtgagcaaaaggccagcaaaaggccaggaaccgtaaaaaggccgcgttgctggcgtttttccataggctccgcccccctgacgagcatcacaaaaatcgacgctcaagtcagaggtggcgaaacccgacaggactataaagataccaggcgtttccccctggaagctccctcgtgcgctctcctgttccgaccctgccgcttaccggatacctgtccgcctttctcccttcgggaagcgtggcgctttctcatagctcacgctgtaggtatctcagttcggtgtaggtcgttcgctccaagctgggctgtgtgcacgaaccccccgttcagcccgaccgctgcgccttatccggtaactatcgtcttgagtccaacccggtaagacacgacttatcgccactggcagcagccactggtaacaggattagcagagcgaggtatgtaggcggtgctacagagttcttgaagtggtggcctaactacggctacactagaagaacagtatttggtatctgcgctctgctgaagccagttaccttcggaaaaagagttggtagctcttgatccggcaaacaaaccaccgctggtagcggtggtttttttgtttgcaagcagcagattacgcgcagaaaaaaaggatctcaagaagatcctttgatcttttctacggggtctgacgctcagtggaacgaaaactcacgttaagggattttggtcatgagattatcaaaaaggatcttcacctagatccttttaaattaaaaatgaagttttaaatcaatctaaagtatatatgagtaaacttggtctgacagttaccaatgcttaatcagtgaggcacctatctcagcgatctgtctatttcgttcatccatagttgcctgactccccgtcgtgtagataactacgatacgggagggcttaccatctggccccagtgctgcaatgataccgcgagacccacgctcaccggctccagatttatcagcaataaaccagccagccggaagggccgagcgcagaagtggtcctgcaactttatccgcctccatccagtctattaattgttgccgggaagctagagtaagtagttcgccagttaatagtttgcgcaacgttgttgccattgctacaggcatcgtggtgtcacgctcgtcgtttggtatggcttcattcagctccggttcccaacgatcaaggcgagttacatgatcccccatgttgtgcaaaaaagcggttagctccttcggtcctccgatcgttgtcagaagtaagttggccgcagtgttatcactcatggttatggcagcactgcataattctcttactgtcatgccatccgtaagatgcttttctgtgactggtgagtactcaaccaagtcattctgagaatagtgtatgcggcgaccgagttgctcttgcccggcgtcaatacgggataataccgcgccacatagcagaactttaaaagtgctcatcattggaaaacgttcttcggggcgaaaactctcaaggatcttaccgctgttgagatccagttcgatgtaacccactcgtgcacccaactgatcttcagcatcttttactttcaccagcgtttctgggtgagcaaaaacaggaaggcaaaatgccgcaaaaaagggaataagggcgacacggaaatgttgaatactcatactcttcctttttcaatattattgaagcatttatcagggttattgtctcatgagcggatacatatttgaatgtatttagaaaaataaacaaataggggttccgcgcacatttccccgaaaagtgccacctgggtcgacattgattattgactagtaatagtaatcaattacggggtcattagttcatagcccatatatggagttccg

SEQ ID NO: 186 - DNA, 4796 bp, synthetic construct
  misc_feature 1..4796: note = Synthetic
  source 1..4796: mol_type = other DNA
cgttacataacttacggtaaatggcccgcctggctgaccgcccaacgacccccgcccattgacgtcaataatgacgtatgttcccatagtaacgccaatagggactttccattgacgtcaatgggtggagtatttacggtaaactgcccacttggcagtacatcaagtgtatcatatgccaagtacgccccctattgacgtcaatgacggtaaatggcccgcctggcattatgcccagtacatgaccttatgggactttcctacttggcagtacatctacgtattagtcatcgctattaccatggtgatgcggttttggcagtacatcaatgggcgtggatagcggtttgactcacggggatttccaagtctccaccccattgacgtcaatgggagtttgttttggcaccaaaatcaacgggactttccaaaatgtcgtaacaactccgccccattgacgcaaatgggcggtaggcgtgtacggtgggaggtctatataagcagagctggtttagtgaaccgtcagatccgctagcgctaccggactcagatcgccaccatgtacccctacgacgtgccagactacgcccctaagaagaagagaaaagtcggcggctctggcggcggaggatctggcggaggtggaagcggaggaaccatctacagcgagcactggtccctgaatcctctggaaatccctcagcggagccggctgtttagcctggaacctgtggctgtgggcacaccttatgccgagagcctgagcagctacctgcacagactggcccaggctcactgtctgacaagcgagaagctggtcatgggcgagatcgcccctctgatcctgaaggacgaggacaagagcgagctgctgagcaagaacctgagccatctgctgggcaacagcgacgccaagcctgccatcaatggcatgagagagatgaccgagaagctcgtgaccgtgctggaagaactgaccatgcggcaggacctgcggtttctgacactgctgtcttggaagggcatgatctacgacaagggcctgttccgcaactacagagcctggtgtccttgctgctgcgaggaatggatgcagaagaacaagacaatctacgagcccctgagctggtccttcaaggacgtggaattctgcctgatccacaagcagcggctgatcgaggaatgcagccattgtggcgctagactgcccgtgatggccagactttctcctgccggcttctgcagcagatgctatggctggctgggccaagagatcaagggcgaagaggaaatcgagaagtaccgcgtgaacatccagggcatctccgagctgattgccctgacacctcagctgggctacaagcccattcctatcgagctgacccggaaactgcagctgatcctgctggtgttcgagcaggccatcggcaaggatgtgaagctgctgggagatctcggcggcatcatggaaagcctgagaatcgccagcaccaccaaccagagccagccttaccacctggtcaagctgatcatccccgtgtgcgagaaggccaagatcagcgtgttccagctgttcggcagcgacttcaaagagctgggcaagatcctgtttggcaacttctccctggaactgaaactgtgactagcataaccccttggggcgcactcctcaggtgcaggctgcctatcagaaggtggtggctggtgtggccaatgccctggctcacaaataccactgagatctttttccctctgccaaaaattatggggacatcatgaagccccttgagcatctgacttctggctaataaaggaaatttattttcattgcaatagtgtgttggaattttttgtgtctctcactcggaaggacatatgggagggcaaatcatttaaaacatcagaatgagtatttggtttagagtttggcaacatatgcccatatgctggctgccatgaacaaaggttggctataaagaggtcatcagtatatgaaacagccccctgctgtccattccttattccatagaaaagccttgacttgaggttagattttttttatattttgttttgtgttatttttttctttaacatccctaaaattttccttacatgttttactagccagatttttcctcctctcctgactactcccagtcatagctgtccctcttctcttatggagatccctcgacctgcagcccaagcttggcgtaatcatggtcatagctgtttcctgtgtgaaattgttatccgctcacaattccacacaacatacgagccggaagcataaagtgtaaagcctggggtgcctaatgagtgagctaactcacattaattgcgttgcgctcactgcccgctttccagtcgggaaacctgtcgtgccagcggatccgcatctcaattagtcagcaaccatagtcccgcccctaactccgcccatcccgcccctaactccgcccagttccgcccattctccgccccatggctgactaattttttttatttatgcagaggccgaggccgcctcggcctctgagctattccagaagtagtgaggaggcttttttggaggcctaggcttttgcaaaaagctaacttgtttattgcagcttataatggttacaaataaagcaatagcatcacaaatttcacaaataaagcatttttttcactgcattctagttgtggtttgtccaaactcatcaatgtatcttatcatgtctggatccgctgcattaatgaatcggccaacgcgcggggagaggcggtttgcgtattgggcgctcttccgcttcctcgctcactgactcgctgcgctcggtcgttcggctgcggcgagcggtatcagctcactcaaaggcggtaatacggttatccacagaatcaggggataacgcaggaaagaacatgtgagcaaaaggccagcaaaaggccaggaaccgtaaaaaggccgcgttgctggcgtttttccataggctccgcccccctgacgagcatcacaaaaatcgacgctcaagtcagaggtggcgaaacccgacaggactataaagataccaggcgtttccccctggaagctccctcgtgcgctctcctgttccgaccctgccgcttaccggatacctgtccgcctttctcccttcgggaagcgtggcgctttctcatagctcacgctgtaggtatctcagttcggtgtaggtcgttcgctccaagctgggctgtgtgcacgaaccccccgttcagcccgaccgctgcgccttatccggtaactatcgtcttgagtccaacccggtaagacacgacttatcgccactggcagcagccactggtaacaggattagcagagcgaggtatgtaggcggtgctacagagttcttgaagtggtggcctaactacggctacactagaagaacagtatttggtatctgcgctctgctgaagccagttaccttcggaaaaagagttggtagctcttgatccggcaaacaaaccaccgctggtagcggtggtttttttgtttgcaagcagcagattacgcgcagaaaaaaaggatctcaagaagatcctttgatcttttctacggggtctgacgctcagtggaacgaaaactcacgttaagggattttggtcatgagattatcaaaaaggatcttcacctagatccttttaaattaaaaatgaagttttaaatcaatctaaagtatatatgagtaaacttggtctgacagttaccaatgcttaatcagtgaggcacctatctcagcgatctgtctatttcgttcatccatagttgcctgactccccgtcgtgtagataactacgatacgggagggcttaccatctggccccagtgctgcaatgataccgcgagacccacgctcaccggctccagatttatcagcaataaaccagccagccggaagggccgagcgcagaagtggtcctgcaactttatccgcctccatccagtctattaattgttgccgggaagctagagtaagtagttcgccagttaatagtttgcgcaacgttgttgccattgctacaggcatcgtggtgtcacgctcgtcgtttggtatggcttcattcagctccggttcccaacgatcaaggcgagttacatgatcccccatgttgtgcaaaaaagcggttagctccttcggtcctccgatcgttgtcagaagtaagttggccgcagtgttatcactcatggttatggcagcactgcataattctcttactgtcatgccatccgtaagatgcttttctgtgactggtgagtactcaaccaagtcattctgagaatagtgtatgcggcgaccgagttgctcttgcccggcgtcaatacgggataataccgcgccacatagcagaactttaaaagtgctcatcattggaaaacgttcttcggggcgaaaactctcaaggatcttaccgctgttgagatccagttcgatgtaacccactcgtgcacccaactgatcttcagcatcttttactttcaccagcgtttctgggtgagcaaaaacaggaaggcaaaatgccgcaaaaaagggaataagggcgacacggaaatgttgaatactcatactcttcctttttcaatattattgaagcatttatcagggttattgtctcatgagcggatacatatttgaatgtatttagaaaaataaacaaataggggttccgcgcacatttccccgaaaagtgccacctgggtcgacattgattattgactagtaatagtaatcaattacggggtcattagttcatagcccatatatggagttccg

SEQ ID NO: 187 - DNA, 6503 bp, synthetic construct
  misc_feature 1..6503: note = Synthetic
  source 1..6503: mol_type = other DNA
cgttacataacttacggtaaatggcccgcctggctgaccgcccaacgacccccgcccattgacgtcaataatgacgtatgttcccatagtaacgccaatagggactttccattgacgtcaatgggtggagtatttacggtaaactgcccacttggcagtacatcaagtgtatcatatgccaagtacgccccctattgacgtcaatgacggtaaatggcccgcctggcattatgcccagtacatgaccttatgggactttcctacttggcagtacatctacgtattagtcatcgctattaccatggtgatgcggttttggcagtacatcaatgggcgtggatagcggtttgactcacggggatttccaagtctccaccccattgacgtcaatgggagtttgttttggcaccaaaatcaacgggactttccaaaatgtcgtaacaactccgccccattgacgcaaatgggcggtaggcgtgtacggtgggaggtctatataagcagagctggtttagtgaaccgtcagatccgctagcgctaccggactcagatcgccaccatgtacccctacgacgtgccagactacgcccctaagaagaagagaaaagtcggcggctctggcggcggaggatctggcggaggtggaagcggaggaaaggaacagttcgagcagtgggtcgcccggctgcagatttctgaagccggccagaaaatcatcgagaaagtgcggagcagcgagcccagcagaagagttggcggaggcagcaagaatgtgtccggcagatacccctccagaaagatgggcgtgaccatccagttcgagagccacagagtggaactgcccatcatctaccagctggaacacgacaaggacgtgctggaattctacgaccagcctcctcagatcaagctggactaccaggccagcaatggcagacgactgggagtgctgcacacccctgatctgttcgtgatcaggaccaatagcgccggctgggaagagtgcaagaccgagcaggatctgaagaagctggccgagaagaaccccaaccggtacttctacagcgaagagaacaaccagtggcacagcctgcctggcgaggtgtacgccaatcagtttggcctgtaccaccggatccacagcgaccgcgaaatcaactgggtgctgcagcggaacctgcagttcctggaagattactaccgcagcgagagcctggtggtggaagaggccattgctcagtctctgctggccatcgtgtctagccagcctggaattacactggccgagctgctgaacagaagcaccggcgccaagagcgacgacatctacaccctgatcatccaagagcagatctacatcgacctgaacgccacacctctggctgagcctgagagatgcctgatcttcagggatgagcagaccgccagcgcctacagactgatggttgagcagcctagcgtgtccctgcctgccatctctcccgtggtcaatattgtgacaggcgccaccgtgtcctgggatggcaagggcctgaatatcatccacgtgggcgagacagaagtgatcctgggcgccgagaacaatcagctcatcgaactgaagaaggccatcttcgagaacctcgtgcggcagggcaagatcacctctctgcagaccccagagaaaaccgccatcagcacagagagctggcagcggtttcatcaggcctctccagaggatcaggccgaggctctggaacggtacaagaccatcgagccctacctgaacggacaccctcctgagaacgagacaatccccgccagaaccatcagacactggaaggccaagtacctgatcgccatccagaagtacggctgcggctatatcggcctgctgtcccacagaagcgtgaagggcaacagacagagaaagctgcccgaggacaccctggccatcatggaaaagttcattctcgaggactacgagacactgaagcagaaacggatgtgggaagtgcacgccgctctcgtgcgagcttgtgaagaagcaggcgttatcgcccctagctacaaggccttcaccaaagaggtgcagcggagaaccggctacgagcagaccaagaagagacaaggcagaagggccgcctaccagcacgagtccttttactgggaactcgccatcaccacacctcggcacggcgatagacctttcgagatcggccacatcgaccacaccgagctggatgtggaactcgtgtgtagcgacaccggcagaaacctgggtagaccttgggccacctttctggtggacgcctactctagaaggctgctggccgtgtacctgaccttcgacagcccaagctaccggtcctgtctcatggtgctgcggatctgcgtgaagaggcatggcagactgcctcagatcgtggtggtcgataatggcgccgagtttcacagcgtgtacttcgaaaccctgctggctaccttcgagtgcaccaagaagcagcggcctccagccaaggccagatttggcagcgtgtgcgagagactgttcggcaccagcaacacccagttcgtgcacaacctgctgggcaatacccagatcacccggaacgtgcggcaagtgaccaagagcgtgaaccccaagaacctggctgtgtggacactgggactgctgtacgagtacctgtgtgcctgggcctacgaagtgtacgataccgacgaacaccccgctctgtttcagagccctagggatgcctttgccgccggaatggctatcggcggatctcgggtgcacagaatgatcccttacgacgagaacttccagatcctgacactgcccaccacctccgagggcaaagccaaggtgcaagtcggcagaggcatcaagatcaactacatctactactggtccaacagcttcagggacccacagatcgagaacaccagcgtgcagatcagatacgaccccttcaacatcggaatcgcctacgccttcgtcagaggccagtgggtgcagtgcatcagccagtactacgccgaactccagggcagaagcgagaaagagctgaaactggccagcatcgagctgcggaagcactacagcaatcacacccagcagagcaaggtgtccgccaaaaacctggccgagttcctggcaagcgtggaagctcaagaagccctgctggaacagagaagctacgacgccgaagtgaaagaggtgttccgggtcatcgaaggcggcaaggccacaaccagcagaaatgaggaacccaagctgatccaagtgaccttcgccaacaccgacttccaggccgatgaggacgaagccatcgtgcctgaaacactggtggtgtacgaggaattctgactagcataaccccttggggcgcactcctcaggtgcaggctgcctatcagaaggtggtggctggtgtggccaatgccctggctcacaaataccactgagatctttttccctctgccaaaaattatggggacatcatgaagccccttgagcatctgacttctggctaataaaggaaatttattttcattgcaatagtgtgttggaattttttgtgtctctcactcggaaggacatatgggagggcaaatcatttaaaacatcagaatgagtatttggtttagagtttggcaacatatgcccatatgctggctgccatgaacaaaggttggctataaagaggtcatcagtatatgaaacagccccctgctgtccattccttattccatagaaaagccttgacttgaggttagattttttttatattttgttttgtgttatttttttctttaacatccctaaaattttccttacatgttttactagccagatttttcctcctctcctgactactcccagtcatagctgtccctcttctcttatggagatccctcgacctgcagcccaagcttggcgtaatcatggtcatagctgtttcctgtgtgaaattgttatccgctcacaattccacacaacatacgagccggaagcataaagtgtaaagcctggggtgcctaatgagtgagctaactcacattaattgcgttgcgctcactgcccgctttccagtcgggaaacctgtcgtgccagcggatccgcatctcaattagtcagcaaccatagtcccgcccctaactccgcccatcccgcccctaactccgcccagttccgcccattctccgccccatggctgactaattttttttatttatgcagaggccgaggccgcctcggcctctgagctattccagaagtagtgaggaggcttttttggaggcctaggcttttgcaaaaagctaacttgtttattgcagcttataatggttacaaataaagcaatagcatcacaaatttcacaaataaagcatttttttcactgcattctagttgtggtttgtccaaactcatcaatgtatcttatcatgtctggatccgctgcattaatgaatcggccaacgcgcggggagaggcggtttgcgtattgggcgctcttccgcttcctcgctcactgactcgctgcgctcggtcgttcggctgcggcgagcggtatcagctcactcaaaggcggtaatacggttatccacagaatcaggggataacgcaggaaagaacatgtgagcaaaaggccagcaaaaggccaggaaccgtaaaaaggccgcgttgctggcgtttttccataggctccgcccccctgacgagcatcacaaaaatcgacgctcaagtcagaggtggcgaaacccgacaggactataaagataccaggcgtttccccctggaagctccctcgtgcgctctcctgttccgaccctgccgcttaccggatacctgtccgcctttctcccttcgggaagcgtggcgctttctcatagctcacgctgtaggtatctcagttcggtgtaggtcgttcgctccaagctgggctgtgtgcacgaaccccccgttcagcccgaccgctgcgccttatccggtaactatcgtcttgagtccaacccggtaagacacgacttatcgccactggcagcagccactggtaacaggattagcagagcgaggtatgtaggcggtgctacagagttcttgaagtggtggcctaactacggctacactagaagaacagtatttggtatctgcgctctgctgaagccagttaccttcggaaaaagagttggtagctcttgatccggcaaacaaaccaccgctggtagcggtggtttttttgtttgcaagcagcagattacgcgcagaaaaaaaggatctcaagaagatcctttgatcttttctacggggtctgacgctcagtggaacgaaaactcacgttaagggattttggtcatgagattatcaaaaaggatcttcacctagatccttttaaattaaaaatgaagttttaaatcaatctaaagtatatatgagtaaacttggtctgacagttaccaatgcttaatcagtgaggcacctatctcagcgatctgtctatttcgttcatccatagttgcctgactccccgtcgtgtagataactacgatacgggagggcttaccatctggccccagtgctgcaatgataccgcgagacccacgctcaccggctccagatttatcagcaataaaccagccagccggaagggccgagcgcagaagtggtcctgcaactttatccgcctccatccagtctattaattgttgccgggaagctagagtaagtagttcgccagttaatagtttgcgcaacgttgttgccattgctacaggcatcgtggtgtcacgctcgtcgtttggtatggcttcattcagctccggttcccaacgatcaaggcgagttacatgatcccccatgttgtgcaaaaaagcggttagctccttcggtcctccgatcgttgtcagaagtaagttggccgcagtgttatcactcatggttatggcagcactgcataattctcttactgtcatgccatccgtaagatgcttttctgtgactggtgagtactcaaccaagtcattctgagaatagtgtatgcggcgaccgagttgctcttgcccggcgtcaatacgggataataccgcgccacatagcagaactttaaaagtgctcatcattggaaaacgttcttcggggcgaaaactctcaaggatcttaccgctgttgagatccagttcgatgtaacccactcgtgcacccaactgatcttcagcatcttttactttcaccagcgtttctgggtgagcaaaaacaggaaggcaaaatgccgcaaaaaagggaataagggcgacacggaaatgttgaatactcatactcttcctttttcaatattattgaagcatttatcagggttattgtctcatgagcggatacatatttgaatgtatttagaaaaataaacaaataggggttccgcgcacatttccccgaaaagtgccacctgggtcgacattgattattgactagtaatagtaatcaattacggggtcattagttcatagcccatatatggagttccg

SEQ ID NO: 188 - DNA, 4958 bp, synthetic construct
  misc_feature 1..4958: note = Synthetic
  source 1..4958: mol_type = other DNA
cgttacataacttacggtaaatggcccgcctggctgaccgcccaacgacccccgcccattgacgtcaataatgacgtatgttcccatagtaacgccaatagggactttccattgacgtcaatgggtggagtatttacggtaaactgcccacttggcagtacatcaagtgtatcatatgccaagtacgccccctattgacgtcaatgacggtaaatggcccgcctggcattatgcccagtacatgaccttatgggactttcctacttggcagtacatctacgtattagtcatcgctattaccatggtgatgcggttttggcagtacatcaatgggcgtggatagcggtttgactcacggggatttccaagtctccaccccattgacgtcaatgggagtttgttttggcaccaaaatcaacgggactttccaaaatgtcgtaacaactccgccccattgacgcaaatgggcggtaggcgtgtacggtgggaggtctatataagcagagctggtttagtgaaccgtcagatccgctagcgctaccggactcagatcgccaccatgtacccctacgacgtgccagactacgcccctaagaagaagagaaaagtcggcggctctggcggcggaggatctggcggaggtggaagcggaggaaccaagagcaccggctttccactggaactgctgaccagacctgccaccgagagactggcctacttcgagaactacaccgtggctcaccccagactgaaagaggtgtacgagatcctgatgcggacaatcgccgaacctgccggcgctagcttcatctttgtgtatggcgctagcggcgtgggcaagaccacactgagactgagagtggaacagaagctgaccgagctggccctgcctaagctggaaagcgatagagccagagtgcccgtcgtgggcattgaggctattgcccctgagagccggtacttcaactggaaagagtactacacacgggccctgatcaccctggaagaacccctgatcgaccacaagttcgactatggcgtgcggggcatcagcagagacaacttcggcaagatcaacgtggaaagcaaggtggtggcccctgctctgagaagggccctcgaaaatgccctgatccacagacaccccgacgtgttctttgtggacgaggcccagcactttggcaaggtggcctctggctacaagctgcaggatcagctggactgcctgaagtccctggccaacatgacaggcatcctgcactgtctgctgggcacctacgagctgctgaccttcagaaatctgagcggccagctgtctcggcggagcgtggacatccacttcagaagatactgcgccgactctcccgaggacgtgcaggcctttaaaagcgtgctgctgacattccagcagcatctgcctctggccgagacacccaatctggtggatcactgggagtacttctacgagagaaccctgggctgcatcggcaccctgaaggactggctgaagagagtgctgagcgacgccctggatagagaggccacaaccatcacactgaaggacctgcagaaaagggccctgagcgtggcccagtgccagaagatgttcaaagagatccaagagggcgaacgccagctgagcgaaacagaggccgatgtgcagaacctgagatctgcccttggcctgggagccaagcctatcgttctgcctgaggaaacccctaagaccaccagacctccaggcaaagtgggcaaaagaaagcccaagagggaccccatcggagtgcagcaggatgtgtcttgactagcataaccccttggggcgcactcctcaggtgcaggctgcctatcagaaggtggtggctggtgtggccaatgccctggctcacaaataccactgagatctttttccctctgccaaaaattatggggacatcatgaagccccttgagcatctgacttctggctaataaaggaaatttattttcattgcaatagtgtgttggaattttttgtgtctctcactcggaaggacatatgggagggcaaatcatttaaaacatcagaatgagtatttggtttagagtttggcaacatatgcccatatgctggctgccatgaacaaaggttggctataaagaggtcatcagtatatgaaacagccccctgctgtccattccttattccatagaaaagccttgacttgaggttagattttttttatattttgttttgtgttatttttttctttaacatccctaaaattttccttacatgttttactagccagatttttcctcctctcctgactactcccagtcatagctgtccctcttctcttatggagatccctcgacctgcagcccaagcttggcgtaatcatggtcatagctgtttcctgtgtgaaattgttatccgctcacaattccacacaacatacgagccggaagcataaagtgtaaagcctggggtgcctaatgagtgagctaactcacattaattgcgttgcgctcactgcccgctttccagtcgggaaacctgtcgtgccagcggatccgcatctcaattagtcagcaaccatagtcccgcccctaactccgcccatcccgcccctaactccgcccagttccgcccattctccgccccatggctgactaattttttttatttatgcagaggccgaggccgcctcggcctctgagctattccagaagtagtgaggaggcttttttggaggcctaggcttttgcaaaaagctaacttgtttattgcagcttataatggttacaaataaagcaatagcatcacaaatttcacaaataaagcatttttttcactgcattctagttgtggtttgtccaaactcatcaatgtatcttatcatgtctggatccgctgcattaatgaatcggccaacgcgcggggagaggcggtttgcgtattgggcgctcttccgcttcctcgctcactgactcgctgcgctcggtcgttcggctgcggcgagcggtatcagctcactcaaaggcggtaatacggttatccacagaatcaggggataacgcaggaaagaacatgtgagcaaaaggccagcaaaaggccaggaaccgtaaaaaggccgcgttgctggcgtttttccataggctccgcccccctgacgagcatcacaaaaatcgacgctcaagtcagaggtggcgaaacccgacaggactataaagataccaggcgtttccccctggaagctccctcgtgcgctctcctgttccgaccctgccgcttaccggatacctgtccgcctttctcccttcgggaagcgtggcgctttctcatagctcacgctgtaggtatctcagttcggtgtaggtcgttcgctccaagctgggctgtgtgcacgaaccccccgttcagcccgaccgctgcgccttatccggtaactatcgtcttgagtccaacccggtaagacacgacttatcgccactggcagcagccactggtaacaggattagcagagcgaggtatgtaggcggtgctacagagttcttgaagtggtggcctaactacggctacactagaagaacagtatttggtatctgcgctctgctgaagccagttaccttcggaaaaagagttggtagctcttgatccggcaaacaaaccaccgctggtagcggtggtttttttgtttgcaagcagcagattacgcgcagaaaaaaaggatctcaagaagatcctttgatcttttctacggggtctgacgctcagtggaacgaaaactcacgttaagggattttggtcatgagattatcaaaaaggatcttcacctagatccttttaaattaaaaatgaagttttaaatcaatctaaagtatatatgagtaaacttggtctgacagttaccaatgcttaatcagtgaggcacctatctcagcgatctgtctatttcgttcatccatagttgcctgactccccgtcgtgtagataactacgatacgggagggcttaccatctggccccagtgctgcaatgataccgcgagacccacgctcaccggctccagatttatcagcaataaaccagccagccggaagggccgagcgcagaagtggtcctgcaactttatccgcctccatccagtctattaattgttgccgggaagctagagtaagtagttcgccagttaatagtttgcgcaacgttgttgccattgctacaggcatcgtggtgtcacgctcgtcgtttggtatggcttcattcagctccggttcccaacgatcaaggcgagttacatgatcccccatgttgtgcaaaaaagcggttagctccttcggtcctccgatcgttgtcagaagtaagttggccgcagtgttatcactcatggttatggcagcactgcataattctcttactgtcatgccatccgtaagatgcttttctgtgactggtgagtactcaaccaagtcattctgagaatagtgtatgcggcgaccgagttgctcttgcccggcgtcaatacgggataataccgcgccacatagcagaactttaaaagtgctcatcattggaaaacgttcttcggggcgaaaactctcaaggatcttaccgctgttgagatccagttcgatgtaacccactcgtgcacccaactgatcttcagcatcttttactttcaccagcgtttctgggtgagcaaaaacaggaaggcaaaatgccgcaaaaaagggaataagggcgacacggaaatgttgaatactcatactcttcctttttcaatattattgaagcatttatcagggttattgtctcatgagcggatacatatttgaatgtatttagaaaaataaacaaataggggttccgcgcacatttccccgaaaagtgccacctgggtcgacattgattattgactagtaatagtaatcaattacggggtcattagttcatagcccatatatggagttccg

SEQ ID NO: 189 - DNA, 4445 bp, synthetic construct
  misc_feature 1..4445: note = Synthetic
  source 1..4445: mol_type = other DNA
cgttacataacttacggtaaatggcccgcctggctgaccgcccaacgacccccgcccattgacgtcaataatgacgtatgttcccatagtaacgccaatagggactttccattgacgtcaatgggtggagtatttacggtaaactgcccacttggcagtacatcaagtgtatcatatgccaagtacgccccctattgacgtcaatgacggtaaatggcccgcctggcattatgcccagtacatgaccttatgggactttcctacttggcagtacatctacgtattagtcatcgctattaccatggtgatgcggttttggcagtacatcaatgggcgtggatagcggtttgactcacggggatttccaagtctccaccccattgacgtcaatgggagtttgttttggcaccaaaatcaacgggactttccaaaatgtcgtaacaactccgccccattgacgcaaatgggcggtaggcgtgtacggtgggaggtctatataagcagagctggtttagtgaaccgtcagatccgctagcgctaccggactcagatcgccaccatgatcgcccctctgatcctgtacctggacgtgcccttcaccaccttcagagagtctcacgccagagagatgggcaagacataccccgttcctccaccagccacagtgtacggcatgctgctgtctctcgtgggcgagacaaacgtgtacagacactgcggcgtggaactggccattgccatgctgagcagccccaagaagtcccggatcctgcggcagatgcggagattcaagaacgccgacttctctcaccccgagaacgtgatcccttgctaccaagagatcctgagcaacctgaagtgcctgatctgggtccgaagcgacgaggaaaagatccagcctagcctgagagagcggatccagctggcctttgatcaccctgaactcgtcagaagattcggctgcctgttcctgggcgagagcgaccagctgatcaagaccatcaagctggccagagaggactacctggaaggcgttagacagtgggccatccgggacaacagaggcagactgacactgccctattgggtcgaccacgtgggcagcagaaatacccggttcctgagataccggatcgaggaaatggaccggctgagccctcctgacctggcttggacaatggtgcagagccccatcggaggatctggcggaggcggctctggcggcggtggaagcggaggacctaagaagaagagaaaagtctacccctacgacgtgccagactacgcctgactagcataaccccttggggcgcactcctcaggtgcaggctgcctatcagaaggtggtggctggtgtggccaatgccctggctcacaaataccactgagatctttttccctctgccaaaaattatggggacatcatgaagccccttgagcatctgacttctggctaataaaggaaatttattttcattgcaatagtgtgttggaattttttgtgtctctcactcggaaggacatatgggagggcaaatcatttaaaacatcagaatgagtatttggtttagagtttggcaacatatgcccatatgctggctgccatgaacaaaggttggctataaagaggtcatcagtatatgaaacagccccctgctgtccattccttattccatagaaaagccttgacttgaggttagattttttttatattttgttttgtgttatttttttctttaacatccctaaaattttccttacatgttttactagccagatttttcctcctctcctgactactcccagtcatagctgtccctcttctcttatggagatccctcgacctgcagcccaagcttggcgtaatcatggtcatagctgtttcctgtgtgaaattgttatccgctcacaattccacacaacatacgagccggaagcataaagtgtaaagcctggggtgcctaatgagtgagctaactcacattaattgcgttgcgctcactgcccgctttccagtcgggaaacctgtcgtgccagcggatccgcatctcaattagtcagcaaccatagtcccgcccctaactccgcccatcccgcccctaactccgcccagttccgcccattctccgccccatggctgactaattttttttatttatgcagaggccgaggccgcctcggcctctgagctattccagaagtagtgaggaggcttttttggaggcctaggcttttgcaaaaagctaacttgtttattgcagcttataatggttacaaataaagcaatagcatcacaaatttcacaaataaagcatttttttcactgcattctagttgtggtttgtccaaactcatcaatgtatcttatcatgtctggatccgctgcattaatgaatcggccaacgcgcggggagaggcggtttgcgtattgggcgctcttccgcttcctcgctcactgactcgctgcgctcggtcgttcggctgcggcgagcggtatcagctcactcaaaggcggtaatacggttatccacagaatcaggggataacgcaggaaagaacatgtgagcaaaaggccagcaaaaggccaggaaccgtaaaaaggccgcgttgctggcgtttttccataggctccgcccccctgacgagcatcacaaaaatcgacgctcaagtcagaggtggcgaaacccgacaggactataaagataccaggcgtttccccctggaagctccctcgtgcgctctcctgttccgaccctgccgcttaccggatacctgtccgcctttctcccttcgggaagcgtggcgctttctcatagctcacgctgtaggtatctcagttcggtgtaggtcgttcgctccaagctgggctgtgtgcacgaaccccccgttcagcccgaccgctgcgccttatccggtaactatcgtcttgagtccaacccggtaagacacgacttatcgccactggcagcagccactggtaacaggattagcagagcgaggtatgtaggcggtgctacagagttcttgaagtggtggcctaactacggctacactagaagaacagtatttggtatctgcgctctgctgaagccagttaccttcggaaaaagagttggtagctcttgatccggcaaacaaaccaccgctggtagcggtggtttttttgtttgcaagcagcagattacgcgcagaaaaaaaggatctcaagaagatcctttgatcttttctacggggtctgacgctcagtggaacgaaaactcacgttaagggattttggtcatgagattatcaaaaaggatcttcacctagatccttttaaattaaaaatgaagttttaaatcaatctaaagtatatatgagtaaacttggtctgacagttaccaatgcttaatcagtgaggcacctatctcagcgatctgtctatttcgttcatccatagttgcctgactccccgtcgtgtagataactacgatacgggagggcttaccatctggccccagtgctgcaatgataccgcgagacccacgctcaccggctccagatttatcagcaataaaccagccagccggaagggccgagcgcagaagtggtcctgcaactttatccgcctccatccagtctattaattgttgccgggaagctagagtaagtagttcgccagttaatagtttgcgcaacgttgttgccattgctacaggcatcgtggtgtcacgctcgtcgtttggtatggcttcattcagctccggttcccaacgatcaaggcgagttacatgatcccccatgttgtgcaaaaaagcggttagctccttcggtcctccgatcgttgtcagaagtaagttggccgcagtgttatcactcatggttatggcagcactgcataattctcttactgtcatgccatccgtaagatgcttttctgtgactggtgagtactcaaccaagtcattctgagaatagtgtatgcggcgaccgagttgctcttgcccggcgtcaatacgggataataccgcgccacatagcagaactttaaaagtgctcatcattggaaaacgttcttcggggcgaaaactctcaaggatcttaccgctgttgagatccagttcgatgtaacccactcgtgcacccaactgatcttcagcatcttttactttcaccagcgtttctgggtgagcaaaaacaggaaggcaaaatgccgcaaaaaagggaataagggcgacacggaaatgttgaatactcatactcttcctttttcaatattattgaagcatttatcagggttattgtctcatgagcggatacatatttgaatgtatttagaaaaataaacaaataggggttccgcgcacatttccccgaaaagtgccacctgggtcgacattgattattgactagtaatagtaatcaattacggggtcattagttcatagcccatatatggagttccg

SEQ ID NO: 190 - DNA, 4469 bp, synthetic construct
  misc_feature 1..4469: note = Synthetic
  source 1..4469: mol_type = other DNA
cgttacataacttacggtaaatggcccgcctggctgaccgcccaacgacccccgcccattgacgtcaataatgacgtatgttcccatagtaacgccaatagggactttccattgacgtcaatgggtggagtatttacggtaaactgcccacttggcagtacatcaagtgtatcatatgccaagtacgccccctattgacgtcaatgacggtaaatggcccgcctggcattatgcccagtacatgaccttatgggactttcctacttggcagtacatctacgtattagtcatcgctattaccatggtgatgcggttttggcagtacatcaatgggcgtggatagcggtttgactcacggggatttccaagtctccaccccattgacgtcaatgggagtttgttttggcaccaaaatcaacgggactttccaaaatgtcgtaacaactccgccccattgacgcaaatgggcggtaggcgtgtacggtgggaggtctatataagcagagctggtttagtgaaccgtcagatccgctagcgctaccggactcagatcgccaccatgaccgccatcctgatccagagcgaggaatacgtggacctgaccttcaagctgagaggcgcccctattcctctggacaacggctacctgacatacgccgctctgagcagaatctgccctcctctgcacgaactgaagtccatcggcattcaccctatcgccggcattcccaccagaaacaacctgctggaactgacagcccagagccggctgaagatcagaatctaccaccagcagatccctctgatctacccctacctggccggacaggcctttcacatcggccagaacttctaccagctggacatccccgactacaagcccctgatcagcagcgagagcgtgtacagcagactggtcatcatcaagggcttccaggacagcaccaacttcatcgaggccgtgcagcggcagatggacaatctgggaatccagggcaagatcgagctgctgaccagacaggatggcacccctcagagaaggcagctgaccatcaacaaagagggcaagcagttcaaagtgcgcggcttcggcgtgaagatctccgagctgaaccctgaggacagcctgacactgcaagagcaaggcatcggcggcaagcggaagatgatgtgcggcatctttgtgcccgccaccagatccaaagaggaagaggaaaccggaggatctggcggaggcggctctggcggcggtggaagcggaggacctaagaagaagagaaaagtctacccctacgacgtgccagactacgcctgactagcataaccccttggggcgcactcctcaggtgcaggctgcctatcagaaggtggtggctggtgtggccaatgccctggctcacaaataccactgagatctttttccctctgccaaaaattatggggacatcatgaagccccttgagcatctgacttctggctaataaaggaaatttattttcattgcaatagtgtgttggaattttttgtgtctctcactcggaaggacatatgggagggcaaatcatttaaaacatcagaatgagtatttggtttagagtttggcaacatatgcccatatgctggctgccatgaacaaaggttggctataaagaggtcatcagtatatgaaacagccccctgctgtccattccttattccatagaaaagccttgacttgaggttagattttttttatattttgttttgtgttatttttttctttaacatccctaaaattttccttacatgttttactagccagatttttcctcctctcctgactactcccagtcatagctgtccctcttctcttatggagatccctcgacctgcagcccaagcttggcgtaatcatggtcatagctgtttcctgtgtgaaattgttatccgctcacaattccacacaacatacgagccggaagcataaagtgtaaagcctggggtgcctaatgagtgagctaactcacattaattgcgttgcgctcactgcccgctttccagtcgggaaacctgtcgtgccagcggatccgcatctcaattagtcagcaaccatagtcccgcccctaactccgcccatcccgcccctaactccgcccagttccgcccattctccgccccatggctgactaattttttttatttatgcagaggccgaggccgcctcggcctctgagctattccagaagtagtgaggaggcttttttggaggcctaggcttttgcaaaaagctaacttgtttattgcagcttataatggttacaaataaagcaatagcatcacaaatttcacaaataaagcatttttttcactgcattctagttgtggtttgtccaaactcatcaatgtatcttatcatgtctggatccgctgcattaatgaatcggccaacgcgcggggagaggcggtttgcgtattgggcgctcttccgcttcctcgctcactgactcgctgcgctcggtcgttcggctgcggcgagcggtatcagctcactcaaaggcggtaatacggttatccacagaatcaggggataacgcaggaaagaacatgtgagcaaaaggccagcaaaaggccaggaaccgtaaaaaggccgcgttgctggcgtttttccataggctccgcccccctgacgagcatcacaaaaatcgacgctcaagtcagaggtggcgaaacccgacaggactataaagataccaggcgtttccccctggaagctccctcgtgcgctctcctgttccgaccctgccgcttaccggatacctgtccgcctttctcccttcgggaagcgtggcgctttctcatagctcacgctgtaggtatctcagttcggtgtaggtcgttcgctccaagctgggctgtgtgcacgaaccccccgttcagcccgaccgctgcgccttatccggtaactatcgtcttgagtccaacccggtaagacacgacttatcgccactggcagcagccactggtaacaggattagcagagcgaggtatgtaggcggtgctacagagttcttgaagtggtggcctaactacggctacactagaagaacagtatttggtatctgcgctctgctgaagccagttaccttcggaaaaagagttggtagctcttgatccggcaaacaaaccaccgctggtagcggtggtttttttgtttgcaagcagcagattacgcgcagaaaaaaaggatctcaagaagatcctttgatcttttctacggggtctgacgctcagtggaacgaaaactcacgttaagggattttggtcatgagattatcaaaaaggatcttcacctagatccttttaaattaaaaatgaagttttaaatcaatctaaagtatatatgagtaaacttggtctgacagttaccaatgcttaatcagtgaggcacctatctcagcgatctgtctatttcgttcatccatagttgcctgactccccgtcgtgtagataactacgatacgggagggcttaccatctggccccagtgctgcaatgataccgcgagacccacgctcaccggctccagatttatcagcaataaaccagccagccggaagggccgagcgcagaagtggtcctgcaactttatccgcctccatccagtctattaattgttgccgggaagctagagtaagtagttcgccagttaatagtttgcgcaacgttgttgccattgctacaggcatcgtggtgtcacgctcgtcgtttggtatggcttcattcagctccggttcccaacgatcaaggcgagttacatgatcccccatgttgtgcaaaaaagcggttagctccttcggtcctccgatcgttgtcagaagtaagttggccgcagtgttatcactcatggttatggcagcactgcataattctcttactgtcatgccatccgtaagatgcttttctgtgactggtgagtactcaaccaagtcattctgagaatagtgtatgcggcgaccgagttgctcttgcccggcgtcaatacgggataataccgcgccacatagcagaactttaaaagtgctcatcattggaaaacgttcttcggggcgaaaactctcaaggatcttaccgctgttgagatccagttcgatgtaacccactcgtgcacccaactgatcttcagcatcttttactttcaccagcgtttctgggtgagcaaaaacaggaaggcaaaatgccgcaaaaaagggaataagggcgacacggaaatgttgaatactcatactcttcctttttcaatattattgaagcatttatcagggttattgtctcatgagcggatacatatttgaatgtatttagaaaaataaacaaataggggttccgcgcacatttccccgaaaagtgccacctgggtcgacattgattattgactagtaatagtaatcaattacggggtcattagttcatagcccatatatggagttccg

SEQ ID NO: 191 - DNA, 4778 bp, synthetic construct
  misc_feature 1..4778: note = Synthetic
  source 1..4778: mol_type = other DNA
cgttacataacttacggtaaatggcccgcctggctgaccgcccaacgacccccgcccattgacgtcaataatgacgtatgttcccatagtaacgccaatagggactttccattgacgtcaatgggtggagtatttacggtaaactgcccacttggcagtacatcaagtgtatcatatgccaagtacgccccctattgacgtcaatgacggtaaatggcccgcctggcattatgcccagtacatgaccttatgggactttcctacttggcagtacatctacgtattagtcatcgctattaccatggtgatgcggttttggcagtacatcaatgggcgtggatagcggtttgactcacggggatttccaagtctccaccccattgacgtcaatgggagtttgttttggcaccaaaatcaacgggactttccaaaatgtcgtaacaactccgccccattgacgcaaatgggcggtaggcgtgtacggtgggaggtctatataagcagagctggtttagtgaaccgtcagatccgctagcgctaccggactcagatcgccaccatgatgacccagaagaagaacgacagcaacatccccaactactacctgtacggcaccgtgctgaccagatacggactggccagcctgaaccacgacatcagaagaggcaacaagaccatcctgcagaaaggctactggaacaacggcaagatccacagcttcgtgggcagcagcgccattagatgggccctgaggttctatctgcagaaacagggctacctggtcaacagagtgtgggacgaagaggaacacatcaacagactgaccagcgaggacttcgaccccgagaagttctacgacgacgacatcttcggcttcgccctgctggaaagcgccgagacagaggaagataccagcaccaccaagcggaagaagaagcagaccaagaccagcacacccaaccagagaatgggcgccctgggcatgaatatggccgtgtctctgaccccttacgatggcgccgtgaagctgggagccaagtctggcagagagaaggacagcaccagcctgcacttcaccgagtaccacgccaccagataccagtactacttcggcatcgacgccacacacctgaaggacttcagccggatcctgcctatgatcgacggcatcatgaacctgcctaaagtcggcggcagcagcaatatcttcaactaccctttctgccccgacagcctggtgttccagtggaccaatcacttcgccagctacatcagctactgcttcgagtactgcgaccccaagagcaaagaggccaagctgagccaagagttcatcgacgaggtggaatgcggccagatcgaccctagcaaactgtggatcggcggcaccatcgtgaaggacctgcagcagctggacaacttcgagagcagccctctgaacaaggcccacatctaccggaaccggaacgagatgatcgaggccctgaaaaccgtgatcaagcgcgacctgggcctcgaggaatccaagggaggatctggcggaggcggctctggcggcggtggaagcggaggacctaagaagaagagaaaagtctacccctacgacgtgccagactacgcctgactagcataaccccttggggcgcactcctcaggtgcaggctgcctatcagaaggtggtggctggtgtggccaatgccctggctcacaaataccactgagatctttttccctctgccaaaaattatggggacatcatgaagccccttgagcatctgacttctggctaataaaggaaatttattttcattgcaatagtgtgttggaattttttgtgtctctcactcggaaggacatatgggagggcaaatcatttaaaacatcagaatgagtatttggtttagagtttggcaacatatgcccatatgctggctgccatgaacaaaggttggctataaagaggtcatcagtatatgaaacagccccctgctgtccattccttattccatagaaaagccttgacttgaggttagattttttttatattttgttttgtgttatttttttctttaacatccctaaaattttccttacatgttttactagccagatttttcctcctctcctgactactcccagtcatagctgtccctcttctcttatggagatccctcgacctgcagcccaagcttggcgtaatcatggtcatagctgtttcctgtgtgaaattgttatccgctcacaattccacacaacatacgagccggaagcataaagtgtaaagcctggggtgcctaatgagtgagctaactcacattaattgcgttgcgctcactgcccgctttccagtcgggaaacctgtcgtgccagcggatccgcatctcaattagtcagcaaccatagtcccgcccctaactccgcccatcccgcccctaactccgcccagttccgcccattctccgccccatggctgactaattttttttatttatgcagaggccgaggccgcctcggcctctgagctattccagaagtagtgaggaggcttttttggaggcctaggcttttgcaaaaagctaacttgtttattgcagcttataatggttacaaataaagcaatagcatcacaaatttcacaaataaagcatttttttcactgcattctagttgtggtttgtccaaactcatcaatgtatcttatcatgtctggatccgctgcattaatgaatcggccaacgcgcggggagaggcggtttgcgtattgggcgctcttccgcttcctcgctcactgactcgctgcgctcggtcgttcggctgcggcgagcggtatcagctcactcaaaggcggtaatacggttatccacagaatcaggggataacgcaggaaagaacatgtgagcaaaaggccagcaaaaggccaggaaccgtaaaaaggccgcgttgctggcgtttttccataggctccgcccccctgacgagcatcacaaaaatcgacgctcaagtcagaggtggcgaaacccgacaggactataaagataccaggcgtttccccctggaagctccctcgtgcgctctcctgttccgaccctgccgcttaccggatacctgtccgcctttctcccttcgggaagcgtggcgctttctcatagctcacgctgtaggtatctcagttcggtgtaggtcgttcgctccaagctgggctgtgtgcacgaaccccccgttcagcccgaccgctgcgccttatccggtaactatcgtcttgagtccaacccggtaagacacgacttatcgccactggcagcagccactggtaacaggattagcagagcgaggtatgtaggcggtgctacagagttcttgaagtggtggcctaactacggctacactagaagaacagtatttggtatctgcgctctgctgaagccagttaccttcggaaaaagagttggtagctcttgatccggcaaacaaaccaccgctggtagcggtggtttttttgtttgcaagcagcagattacgcgcagaaaaaaaggatctcaagaagatcctttgatcttttctacggggtctgacgctcagtggaacgaaaactcacgttaagggattttggtcatgagattatcaaaaaggatcttcacctagatccttttaaattaaaaatgaagttttaaatcaatctaaagtatatatgagtaaacttggtctgacagttaccaatgcttaatcagtgaggcacctatctcagcgatctgtctatttcgttcatccatagttgcctgactccccgtcgtgtagataactacgatacgggagggcttaccatctggccccagtgctgcaatgataccgcgagacccacgctcaccggctccagatttatcagcaataaaccagccagccggaagggccgagcgcagaagtggtcctgcaactttatccgcctccatccagtctattaattgttgccgggaagctagagtaagtagttcgccagttaatagtttgcgcaacgttgttgccattgctacaggcatcgtggtgtcacgctcgtcgtttggtatggcttcattcagctccggttcccaacgatcaaggcgagttacatgatcccccatgttgtgcaaaaaagcggttagctccttcggtcctccgatcgttgtcagaagtaagttggccgcagtgttatcactcatggttatggcagcactgcataattctcttactgtcatgccatccgtaagatgcttttctgtgactggtgagtactcaaccaagtcattctgagaatagtgtatgcggcgaccgagttgctcttgcccggcgtcaatacgggataataccgcgccacatagcagaactttaaaagtgctcatcattggaaaacgttcttcggggcgaaaactctcaaggatcttaccgctgttgagatccagttcgatgtaacccactcgtgcacccaactgatcttcagcatcttttactttcaccagcgtttctgggtgagcaaaaacaggaaggcaaaatgccgcaaaaaagggaataagggcgacacggaaatgttgaatactcatactcttcctttttcaatattattgaagcatttatcagggttattgtctcatgagcggatacatatttgaatgtatttagaaaaataaacaaataggggttccgcgcacatttccccgaaaagtgccacctgggtcgacattgattattgactagtaatagtaatcaattacggggtcattagttcatagcccatatatggagttccg

SEQ ID NO: 192 - DNA, 5387 bp, synthetic construct
  misc_feature 1..5387: note = Synthetic
  source 1..5387: mol_type = other DNA
cgttacataacttacggtaaatggcccgcctggctgaccgcccaacgacccccgcccattgacgtcaataatgacgtatgttcccatagtaacgccaatagggactttccattgacgtcaatgggtggagtatttacggtaaactgcccacttggcagtacatcaagtgtatcatatgccaagtacgccccctattgacgtcaatgacggtaaatggcccgcctggcattatgcccagtacatgaccttatgggactttcctacttggcagtacatctacgtattagtcatcgctattaccatggtgatgcggttttggcagtacatcaatgggcgtggatagcggtttgactcacggggatttccaagtctccaccccattgacgtcaatgggagtttgttttggcaccaaaatcaacgggactttccaaaatgtcgtaacaactccgccccattgacgcaaatgggcggtaggcgtgtacggtgggaggtctatataagcagagctggtttagtgaaccgtcagatccgctagcgctaccggactcagatcgccaccatgatcgtgtccacacagcccaagatcagcctgtctctgcacgccgccgataccaccatcatgcacagagtgggcatgaccggcctgtacatgaccctgaagcggctggaaaagcagtaccctctgagcagacagagaggcggccacatcagctggtttctgaccgccgacaccatcgagctgttttgggagggcagcgactttatcgccctgagctggctgatcaacgagagctttcagctggacgacaccggcctgatccacctcgttggcctggacaacgaccggatcgacctgagacagaagatccacatccacgagggaatctgcggcgtgttcctgcggctgaacaagttttaccaggccggcgagatcatcaacaccgagctgagattcgaagagaagcaggtcgagtaccagtacaagagcctgacttggtacgcccaccagaccttcgccgagaagctgtgcgaagccgatacacagcagctgcggcacgactacatccagatcaccagctggctgtacctcggcggaattgtgcggcatgccagaacacagaacaccaccaagctggaagagaaacccgagtacgccctggctctgctgtttgtgcctgtcgtgtgccactactgcctgctgcacatccctagcgaggacctgaaagagcggaagccccacagatacctggtggtcatccccgagatcaaggacttcgaggatgccagccagagaagatggcggctgcagcagctggaaacaaagcagttccacgtgtccagcctgggcgaagccggcctgctgtactacagcctggatgacattcagcccgaggtggcctactaccaggcctgtcaagtgtggctgtacgaaaagaccaacaaggccagccggcagcggaccctgatgagcatcgaggaaatcaagatcgacaagaacatcctcatcacctaccagcaggtccagaagtactttaagaccaactaccagatcattaagtacaagcagatcttcatcaaagtgaaccccattcggagcctgatcgccgacaatctggtcaagggaatccactggtggtccaatttctgggagaagctggtcatcgaggacagcaaagagtacctgttcaaccagctgttcagcaaccgcgagggcttcatcatcatggccgagaacagcgaagaggacaagcagtatctgatctttatcaaggtgttccagcaggccatgaagggcaacttcgccaagatctacgccaagaccgaggaaggcaaggaccctcctatcaagaaaaaggtggaacggctgcgggccgagctgaactactgttacgatgagctgagcttcaaagaatacctgagcgacttcctcgtcagaggcggactgaacaaatacttcaacgagcaccaagaggaaatcgccctgctgatcaagaagtccccttggcaagagatcagaatctggtccctgctggccattgccagctacaagcccaaggacaagctgaccaaccgggacgatagcagcctgagcaacaaccagaaactggaagaagtgaacgacgacagcgaggaagagggaggatctggcggaggcggctctggcggcggtggaagcggaggacctaagaagaagagaaaagtctacccctacgacgtgccagactacgcctgactagcataaccccttggggcgcactcctcaggtgcaggctgcctatcagaaggtggtggctggtgtggccaatgccctggctcacaaataccactgagatctttttccctctgccaaaaattatggggacatcatgaagccccttgagcatctgacttctggctaataaaggaaatttattttcattgcaatagtgtgttggaattttttgtgtctctcactcggaaggacatatgggagggcaaatcatttaaaacatcagaatgagtatttggtttagagtttggcaacatatgcccatatgctggctgccatgaacaaaggttggctataaagaggtcatcagtatatgaaacagccccctgctgtccattccttattccatagaaaagccttgacttgaggttagattttttttatattttgttttgtgttatttttttctttaacatccctaaaattttccttacatgttttactagccagatttttcctcctctcctgactactcccagtcatagctgtccctcttctcttatggagatccctcgacctgcagcccaagcttggcgtaatcatggtcatagctgtttcctgtgtgaaattgttatccgctcacaattccacacaacatacgagccggaagcataaagtgtaaagcctggggtgcctaatgagtgagctaactcacattaattgcgttgcgctcactgcccgctttccagtcgggaaacctgtcgtgccagcggatccgcatctcaattagtcagcaaccatagtcccgcccctaactccgcccatcccgcccctaactccgcccagttccgcccattctccgccccatggctgactaattttttttatttatgcagaggccgaggccgcctcggcctctgagctattccagaagtagtgaggaggcttttttggaggcctaggcttttgcaaaaagctaacttgtttattgcagcttataatggttacaaataaagcaatagcatcacaaatttcacaaataaagcatttttttcactgcattctagttgtggtttgtccaaactcatcaatgtatcttatcatgtctggatccgctgcattaatgaatcggccaacgcgcggggagaggcggtttgcgtattgggcgctcttccgcttcctcgctcactgactcgctgcgctcggtcgttcggctgcggcgagcggtatcagctcactcaaaggcggtaatacggttatccacagaatcaggggataacgcaggaaagaacatgtgagcaaaaggccagcaaaaggccaggaaccgtaaaaaggccgcgttgctggcgtttttccataggctccgcccccctgacgagcatcacaaaaatcgacgctcaagtcagaggtggcgaaacccgacaggactataaagataccaggcgtttccccctggaagctccctcgtgcgctctcctgttccgaccctgccgcttaccggatacctgtccgcctttctcccttcgggaagcgtggcgctttctcatagctcacgctgtaggtatctcagttcggtgtaggtcgttcgctccaagctgggctgtgtgcacgaaccccccgttcagcccgaccgctgcgccttatccggtaactatcgtcttgagtccaacccggtaagacacgacttatcgccactggcagcagccactggtaacaggattagcagagcgaggtatgtaggcggtgctacagagttcttgaagtggtggcctaactacggctacactagaagaacagtatttggtatctgcgctctgctgaagccagttaccttcggaaaaagagttggtagctcttgatccggcaaacaaaccaccgctggtagcggtggtttttttgtttgcaagcagcagattacgcgcagaaaaaaaggatctcaagaagatcctttgatcttttctacggggtctgacgctcagtggaacgaaaactcacgttaagggattttggtcatgagattatcaaaaaggatcttcacctagatccttttaaattaaaaatgaagttttaaatcaatctaaagtatatatgagtaaacttggtctgacagttaccaatgcttaatcagtgaggcacctatctcagcgatctgtctatttcgttcatccatagttgcctgactccccgtcgtgtagataactacgatacgggagggcttaccatctggccccagtgctgcaatgataccgcgagacccacgctcaccggctccagatttatcagcaataaaccagccagccggaagggccgagcgcagaagtggtcctgcaactttatccgcctccatccagtctattaattgttgccgggaagctagagtaagtagttcgccagttaatagtttgcgcaacgttgttgccattgctacaggcatcgtggtgtcacgctcgtcgtttggtatggcttcattcagctccggttcccaacgatcaaggcgagttacatgatcccccatgttgtgcaaaaaagcggttagctccttcggtcctccgatcgttgtcagaagtaagttggccgcagtgttatcactcatggttatggcagcactgcataattctcttactgtcatgccatccgtaagatgcttttctgtgactggtgagtactcaaccaagtcattctgagaatagtgtatgcggcgaccgagttgctcttgcccggcgtcaatacgggataataccgcgccacatagcagaactttaaaagtgctcatcattggaaaacgttcttcggggcgaaaactctcaaggatcttaccgctgttgagatccagttcgatgtaacccactcgtgcacccaactgatcttcagcatcttttactttcaccagcgtttctgggtgagcaaaaacaggaaggcaaaatgccgcaaaaaagggaataagggcgacacggaaatgttgaatactcatactcttcctttttcaatattattgaagcatttatcagggttattgtctcatgagcggatacatatttgaatgtatttagaaaaataaacaaataggggttccgcgcacatttccccgaaaagtgccacctgggtcgacattgattattgactagtaatagtaatcaattacggggtcattagttcatagcccatatatggagttccg

SEQ ID NO: 193 - DNA, 4796 bp, synthetic construct
  misc_feature 1..4796: note = Synthetic
  source 1..4796: mol_type = other DNA
cgttacataacttacggtaaatggcccgcctggctgaccgcccaacgacccccgcccattgacgtcaataatgacgtatgttcccatagtaacgccaatagggactttccattgacgtcaatgggtggagtatttacggtaaactgcccacttggcagtacatcaagtgtatcatatgccaagtacgccccctattgacgtcaatgacggtaaatggcccgcctggcattatgcccagtacatgaccttatgggactttcctacttggcagtacatctacgtattagtcatcgctattaccatggtgatgcggttttggcagtacatcaatgggcgtggatagcggtttgactcacggggatttccaagtctccaccccattgacgtcaatgggagtttgttttggcaccaaaatcaacgggactttccaaaatgtcgtaacaactccgccccattgacgcaaatgggcggtaggcgtgtacggtgggaggtctatataagcagagctggtttagtgaaccgtcagatccgctagcgctaccggactcagatcgccaccatgaccatctacagcgagcactggtccctgaatcctctggaaatccctcagcggagccggctgtttagcctggaacctgtggctgtgggcacaccttatgccgagagcctgagcagctacctgcacagactggcccaggctcactgtctgacaagcgagaagctggtcatgggcgagatcgcccctctgatcctgaaggacgaggacaagagcgagctgctgagcaagaacctgagccatctgctgggcaacagcgacgccaagcctgccatcaatggcatgagagagatgaccgagaagctcgtgaccgtgctggaagaactgaccatgcggcaggacctgcggtttctgacactgctgtcttggaagggcatgatctacgacaagggcctgttccgcaactacagagcctggtgtccttgctgctgcgaggaatggatgcagaagaacaagacaatctacgagcccctgagctggtccttcaaggacgtggaattctgcctgatccacaagcagcggctgatcgaggaatgcagccattgtggcgctagactgcccgtgatggccagactttctcctgccggcttctgcagcagatgctatggctggctgggccaagagatcaagggcgaagaggaaatcgagaagtaccgcgtgaacatccagggcatctccgagctgattgccctgacacctcagctgggctacaagcccattcctatcgagctgacccggaaactgcagctgatcctgctggtgttcgagcaggccatcggcaaggatgtgaagctgctgggagatctcggcggcatcatggaaagcctgagaatcgccagcaccaccaaccagagccagccttaccacctggtcaagctgatcatccccgtgtgcgagaaggccaagatcagcgtgttccagctgttcggcagcgacttcaaagagctgggcaagatcctgtttggcaacttctccctggaactgaaactgggaggatctggcggaggcggctctggcggcggtggaagcggaggacctaagaagaagagaaaagtctacccctacgacgtgccagactacgcctgactagcataaccccttggggcgcactcctcaggtgcaggctgcctatcagaaggtggtggctggtgtggccaatgccctggctcacaaataccactgagatctttttccctctgccaaaaattatggggacatcatgaagccccttgagcatctgacttctggctaataaaggaaatttattttcattgcaatagtgtgttggaattttttgtgtctctcactcggaaggacatatgggagggcaaatcatttaaaacatcagaatgagtatttggtttagagtttggcaacatatgcccatatgctggctgccatgaacaaaggttggctataaagaggtcatcagtatatgaaacagccccctgctgtccattccttattccatagaaaagccttgacttgaggttagattttttttatattttgttttgtgttatttttttctttaacatccctaaaattttccttacatgttttactagccagatttttcctcctctcctgactactcccagtcatagctgtccctcttctcttatggagatccctcgacctgcagcccaagcttggcgtaatcatggtcatagctgtttcctgtgtgaaattgttatccgctcacaattccacacaacatacgagccggaagcataaagtgtaaagcctggggtgcctaatgagtgagctaactcacattaattgcgttgcgctcactgcccgctttccagtcgggaaacctgtcgtgccagcggatccgcatctcaattagtcagcaaccatagtcccgcccctaactccgcccatcccgcccctaactccgcccagttccgcccattctccgccccatggctgactaattttttttatttatgcagaggccgaggccgcctcggcctctgagctattccagaagtagtgaggaggcttttttggaggcctaggcttttgcaaaaagctaacttgtttattgcagcttataatggttacaaataaagcaatagcatcacaaatttcacaaataaagcatttttttcactgcattctagttgtggtttgtccaaactcatcaatgtatcttatcatgtctggatccgctgcattaatgaatcggccaacgcgcggggagaggcggtttgcgtattgggcgctcttccgcttcctcgctcactgactcgctgcgctcggtcgttcggctgcggcgagcggtatcagctcactcaaaggcggtaatacggttatccacagaatcaggggataacgcaggaaagaacatgtgagcaaaaggccagcaaaaggccaggaaccgtaaaaaggccgcgttgctggcgtttttccataggctccgcccccctgacgagcatcacaaaaatcgacgctcaagtcagaggtggcgaaacccgacaggactataaagataccaggcgtttccccctggaagctccctcgtgcgctctcctgttccgaccctgccgcttaccggatacctgtccgcctttctcccttcgggaagcgtggcgctttctcatagctcacgctgtaggtatctcagttcggtgtaggtcgttcgctccaagctgggctgtgtgcacgaaccccccgttcagcccgaccgctgcgccttatccggtaactatcgtcttgagtccaacccggtaagacacgacttatcgccactggcagcagccactggtaacaggattagcagagcgaggtatgtaggcggtgctacagagttcttgaagtggtggcctaactacggctacactagaagaacagtatttggtatctgcgctctgctgaagccagttaccttcggaaaaagagttggtagctcttgatccggcaaacaaaccaccgctggtagcggtggtttttttgtttgcaagcagcagattacgcgcagaaaaaaaggatctcaagaagatcctttgatcttttctacggggtctgacgctcagtggaacgaaaactcacgttaagggattttggtcatgagattatcaaaaaggatcttcacctagatccttttaaattaaaaatgaagttttaaatcaatctaaagtatatatgagtaaacttggtctgacagttaccaatgcttaatcagtgaggcacctatctcagcgatctgtctatttcgttcatccatagttgcctgactccccgtcgtgtagataactacgatacgggagggcttaccatctggccccagtgctgcaatgataccgcgagacccacgctcaccggctccagatttatcagcaataaaccagccagccggaagggccgagcgcagaagtggtcctgcaactttatccgcctccatccagtctattaattgttgccgggaagctagagtaagtagttcgccagttaatagtttgcgcaacgttgttgccattgctacaggcatcgtggtgtcacgctcgtcgtttggtatggcttcattcagctccggttcccaacgatcaaggcgagttacatgatcccccatgttgtgcaaaaaagcggttagctccttcggtcctccgatcgttgtcagaagtaagttggccgcagtgttatcactcatggttatggcagcactgcataattctcttactgtcatgccatccgtaagatgcttttctgtgactggtgagtactcaaccaagtcattctgagaatagtgtatgcggcgaccgagttgctcttgcccggcgtcaatacgggataataccgcgccacatagcagaactttaaaagtgctcatcattggaaaacgttcttcggggcgaaaactctcaaggatcttaccgctgttgagatccagttcgatgtaacccactcgtgcacccaactgatcttcagcatcttttactttcaccagcgtttctgggtgagcaaaaacaggaaggcaaaatgccgcaaaaaagggaataagggcgacacggaaatgttgaatactcatactcttcctttttcaatattattgaagcatttatcagggttattgtctcatgagcggatacatatttgaatgtatttagaaaaataaacaaataggggttccgcgcacatttccccgaaaagtgccacctgggtcgacattgattattgactagtaatagtaatcaattacggggtcattagttcatagcccatatatggagttccg

SEQ ID NO: 194 - DNA, 6503 bp, synthetic construct
  misc_feature 1..6503: note = Synthetic
  source 1..6503: mol_type = other DNA
cgttacataacttacggtaaatggcccgcctggctgaccgcccaacgacccccgcccattgacgtcaataatgacgtatgttcccatagtaacgccaatagggactttccattgacgtcaatgggtggagtatttacggtaaactgcccacttggcagtacatcaagtgtatcatatgccaagtacgccccctattgacgtcaatgacggtaaatggcccgcctggcattatgcccagtacatgaccttatgggactttcctacttggcagtacatctacgtattagtcatcgctattaccatggtgatgcggttttggcagtacatcaatgggcgtggatagcggtttgactcacggggatttccaagtctccaccccattgacgtcaatgggagtttgttttggcaccaaaatcaacgggactttccaaaatgtcgtaacaactccgccccattgacgcaaatgggcggtaggcgtgtacggtgggaggtctatataagcagagctggtttagtgaaccgtcagatccgctagcgctaccggactcagatcgccaccatgaaggaacagttcgagcagtgggtcgcccggctgcagatttctgaagccggccagaaaatcatcgagaaagtgcggagcagcgagcccagcagaagagttggcggaggcagcaagaatgtgtccggcagatacccctccagaaagatgggcgtgaccatccagttcgagagccacagagtggaactgcccatcatctaccagctggaacacgacaaggacgtgctggaattctacgaccagcctcctcagatcaagctggactaccaggccagcaatggcagacgactgggagtgctgcacacccctgatctgttcgtgatcaggaccaatagcgccggctgggaagagtgcaagaccgagcaggatctgaagaagctggccgagaagaaccccaaccggtacttctacagcgaagagaacaaccagtggcacagcctgcctggcgaggtgtacgccaatcagtttggcctgtaccaccggatccacagcgaccgcgaaatcaactgggtgctgcagcggaacctgcagttcctggaagattactaccgcagcgagagcctggtggtggaagaggccattgctcagtctctgctggccatcgtgtctagccagcctggaattacactggccgagctgctgaacagaagcaccggcgccaagagcgacgacatctacaccctgatcatccaagagcagatctacatcgacctgaacgccacacctctggctgagcctgagagatgcctgatcttcagggatgagcagaccgccagcgcctacagactgatggttgagcagcctagcgtgtccctgcctgccatctctcccgtggtcaatattgtgacaggcgccaccgtgtcctgggatggcaagggcctgaatatcatccacgtgggcgagacagaagtgatcctgggcgccgagaacaatcagctcatcgaactgaagaaggccatcttcgagaacctcgtgcggcagggcaagatcacctctctgcagaccccagagaaaaccgccatcagcacagagagctggcagcggtttcatcaggcctctccagaggatcaggccgaggctctggaacggtacaagaccatcgagccctacctgaacggacaccctcctgagaacgagacaatccccgccagaaccatcagacactggaaggccaagtacctgatcgccatccagaagtacggctgcggctatatcggcctgctgtcccacagaagcgtgaagggcaacagacagagaaagctgcccgaggacaccctggccatcatggaaaagttcattctcgaggactacgagacactgaagcagaaacggatgtgggaagtgcacgccgctctcgtgcgagcttgtgaagaagcaggcgttatcgcccctagctacaaggccttcaccaaagaggtgcagcggagaaccggctacgagcagaccaagaagagacaaggcagaagggccgcctaccagcacgagtccttttactgggaactcgccatcaccacacctcggcacggcgatagacctttcgagatcggccacatcgaccacaccgagctggatgtggaactcgtgtgtagcgacaccggcagaaacctgggtagaccttgggccacctttctggtggacgcctactctagaaggctgctggccgtgtacctgaccttcgacagcccaagctaccggtcctgtctcatggtgctgcggatctgcgtgaagaggcatggcagactgcctcagatcgtggtggtcgataatggcgccgagtttcacagcgtgtacttcgaaaccctgctggctaccttcgagtgcaccaagaagcagcggcctccagccaaggccagatttggcagcgtgtgcgagagactgttcggcaccagcaacacccagttcgtgcacaacctgctgggcaatacccagatcacccggaacgtgcggcaagtgaccaagagcgtgaaccccaagaacctggctgtgtggacactgggactgctgtacgagtacctgtgtgcctgggcctacgaagtgtacgataccgacgaacaccccgctctgtttcagagccctagggatgcctttgccgccggaatggctatcggcggatctcgggtgcacagaatgatcccttacgacgagaacttccagatcctgacactgcccaccacctccgagggcaaagccaaggtgcaagtcggcagaggcatcaagatcaactacatctactactggtccaacagcttcagggacccacagatcgagaacaccagcgtgcagatcagatacgaccccttcaacatcggaatcgcctacgccttcgtcagaggccagtgggtgcagtgcatcagccagtactacgccgaactccagggcagaagcgagaaagagctgaaactggccagcatcgagctgcggaagcactacagcaatcacacccagcagagcaaggtgtccgccaaaaacctggccgagttcctggcaagcgtggaagctcaagaagccctgctggaacagagaagctacgacgccgaagtgaaagaggtgttccgggtcatcgaaggcggcaaggccacaaccagcagaaatgaggaacccaagctgatccaagtgaccttcgccaacaccgacttccaggccgatgaggacgaagccatcgtgcctgaaacactggtggtgtacgaggaattcggaggatctggcggaggcggctctggcggcggtggaagcggaggacctaagaagaagagaaaagtctacccctacgacgtgccagactacgcctgactagcataaccccttggggcgcactcctcaggtgcaggctgcctatcagaaggtggtggctggtgtggccaatgccctggctcacaaataccactgagatctttttccctctgccaaaaattatggggacatcatgaagccccttgagcatctgacttctggctaataaaggaaatttattttcattgcaatagtgtgttggaattttttgtgtctctcactcggaaggacatatgggagggcaaatcatttaaaacatcagaatgagtatttggtttagagtttggcaacatatgcccatatgctggctgccatgaacaaaggttggctataaagaggtcatcagtatatgaaacagccccctgctgtccattccttattccatagaaaagccttgacttgaggttagattttttttatattttgttttgtgttatttttttctttaacatccctaaaattttccttacatgttttactagccagatttttcctcctctcctgactactcccagtcatagctgtccctcttctcttatggagatccctcgacctgcagcccaagcttggcgtaatcatggtcatagctgtttcctgtgtgaaattgttatccgctcacaattccacacaacatacgagccggaagcataaagtgtaaagcctggggtgcctaatgagtgagctaactcacattaattgcgttgcgctcactgcccgctttccagtcgggaaacctgtcgtgccagcggatccgcatctcaattagtcagcaaccatagtcccgcccctaactccgcccatcccgcccctaactccgcccagttccgcccattctccgccccatggctgactaattttttttatttatgcagaggccgaggccgcctcggcctctgagctattccagaagtagtgaggaggcttttttggaggcctaggcttttgcaaaaagctaacttgtttattgcagcttataatggttacaaataaagcaatagcatcacaaatttcacaaataaagcatttttttcactgcattctagttgtggtttgtccaaactcatcaatgtatcttatcatgtctggatccgctgcattaatgaatcggccaacgcgcggggagaggcggtttgcgtattgggcgctcttccgcttcctcgctcactgactcgctgcgctcggtcgttcggctgcggcgagcggtatcagctcactcaaaggcggtaatacggttatccacagaatcaggggataacgcaggaaagaacatgtgagcaaaaggccagcaaaaggccaggaaccgtaaaaaggccgcgttgctggcgtttttccataggctccgcccccctgacgagcatcacaaaaatcgacgctcaagtcagaggtggcgaaacccgacaggactataaagataccaggcgtttccccctggaagctccctcgtgcgctctcctgttccgaccctgccgcttaccggatacctgtccgcctttctcccttcgggaagcgtggcgctttctcatagctcacgctgtaggtatctcagttcggtgtaggtcgttcgctccaagctgggctgtgtgcacgaaccccccgttcagcccgaccgctgcgccttatccggtaactatcgtcttgagtccaacccggtaagacacgacttatcgccactggcagcagccactggtaacaggattagcagagcgaggtatgtaggcggtgctacagagttcttgaagtggtggcctaactacggctacactagaagaacagtatttggtatctgcgctctgctgaagccagttaccttcggaaaaagagttggtagctcttgatccggcaaacaaaccaccgctggtagcggtggtttttttgtttgcaagcagcagattacgcgcagaaaaaaaggatctcaagaagatcctttgatcttttctacggggtctgacgctcagtggaacgaaaactcacgttaagggattttggtcatgagattatcaaaaaggatcttcacctagatccttttaaattaaaaatgaagttttaaatcaatctaaagtatatatgagtaaacttggtctgacagttaccaatgcttaatcagtgaggcacctatctcagcgatctgtctatttcgttcatccatagttgcctgactccccgtcgtgtagataactacgatacgggagggcttaccatctggccccagtgctgcaatgataccgcgagacccacgctcaccggctccagatttatcagcaataaaccagccagccggaagggccgagcgcagaagtggtcctgcaactttatccgcctccatccagtctattaattgttgccgggaagctagagtaagtagttcgccagttaatagtttgcgcaacgttgttgccattgctacaggcatcgtggtgtcacgctcgtcgtttggtatggcttcattcagctccggttcccaacgatcaaggcgagttacatgatcccccatgttgtgcaaaaaagcggttagctccttcggtcctccgatcgttgtcagaagtaagttggccgcagtgttatcactcatggttatggcagcactgcataattctcttactgtcatgccatccgtaagatgcttttctgtgactggtgagtactcaaccaagtcattctgagaatagtgtatgcggcgaccgagttgctcttgcccggcgtcaatacgggataataccgcgccacatagcagaactttaaaagtgctcatcattggaaaacgttcttcggggcgaaaactctcaaggatcttaccgctgttgagatccagttcgatgtaacccactcgtgcacccaactgatcttcagcatcttttactttcaccagcgtttctgggtgagcaaaaacaggaaggcaaaatgccgcaaaaaagggaataagggcgacacggaaatgttgaatactcatactcttcctttttcaatattattgaagcatttatcagggttattgtctcatgagcggatacatatttgaatgtatttagaaaaataaacaaataggggttccgcgcacatttccccgaaaagtgccacctgggtcgacattgattattgactagtaatagtaatcaattacggggtcattagttcatagcccatatatggagttccg

SEQ ID NO: 195 - DNA, 4958 bp, synthetic construct
  misc_feature 1..4958: note = Synthetic
  source 1..4958: mol_type = other DNA
cgttacataacttacggtaaatggcccgcctggctgaccgcccaacgacccccgcccattgacgtcaataatgacgtatgttcccatagtaacgccaatagggactttccattgacgtcaatgggtggagtatttacggtaaactgcccacttggcagtacatcaagtgtatcatatgccaagtacgccccctattgacgtcaatgacggtaaatggcccgcctggcattatgcccagtacatgaccttatgggactttcctacttggcagtacatctacgtattagtcatcgctattaccatggtgatgcggttttggcagtacatcaatgggcgtggatagcggtttgactcacggggatttccaagtctccaccccattgacgtcaatgggagtttgttttggcaccaaaatcaacgggactttccaaaatgtcgtaacaactccgccccattgacgcaaatgggcggtaggcgtgtacggtgggaggtctatataagcagagctggtttagtgaaccgtcagatccgctagcgctaccggactcagatcgccaccatgaccaagagcaccggctttccactggaactgctgaccagacctgccaccgagagactggcctacttcgagaactacaccgtggctcaccccagactgaaagaggtgtacgagatcctgatgcggacaatcgccgaacctgccggcgctagcttcatctttgtgtatggcgctagcggcgtgggcaagaccacactgagactgagagtggaacagaagctgaccgagctggccctgcctaagctggaaagcgatagagccagagtgcccgtcgtgggcattgaggctattgcccctgagagccggtacttcaactggaaagagtactacacacgggccctgatcaccctggaagaacccctgatcgaccacaagttcgactatggcgtgcggggcatcagcagagacaacttcggcaagatcaacgtggaaagcaaggtggtggcccctgctctgagaagggccctcgaaaatgccctgatccacagacaccccgacgtgttctttgtggacgaggcccagcactttggcaaggtggcctctggctacaagctgcaggatcagctggactgcctgaagtccctggccaacatgacaggcatcctgcactgtctgctgggcacctacgagctgctgaccttcagaaatctgagcggccagctgtctcggcggagcgtggacatccacttcagaagatactgcgccgactctcccgaggacgtgcaggcctttaaaagcgtgctgctgacattccagcagcatctgcctctggccgagacacccaatctggtggatcactgggagtacttctacgagagaaccctgggctgcatcggcaccctgaaggactggctgaagagagtgctgagcgacgccctggatagagaggccacaaccatcacactgaaggacctgcagaaaagggccctgagcgtggcccagtgccagaagatgttcaaagagatccaagagggcgaacgccagctgagcgaaacagaggccgatgtgcagaacctgagatctgcccttggcctgggagccaagcctatcgttctgcctgaggaaacccctaagaccaccagacctccaggcaaagtgggcaaaagaaagcccaagagggaccccatcggagtgcagcaggatgtgtctggaggatctggcggaggcggctctggcggcggtggaagcggaggacctaagaagaagagaaaagtctacccctacgacgtgccagactacgcctgactagcataaccccttggggcgcactcctcaggtgcaggctgcctatcagaaggtggtggctggtgtggccaatgccctggctcacaaataccactgagatctttttccctctgccaaaaattatggggacatcatgaagccccttgagcatctgacttctggctaataaaggaaatttattttcattgcaatagtgtgttggaattttttgtgtctctcactcggaaggacatatgggagggcaaatcatttaaaacatcagaatgagtatttggtttagagtttggcaacatatgcccatatgctggctgccatgaacaaaggttggctataaagaggtcatcagtatatgaaacagccccctgctgtccattccttattccatagaaaagccttgacttgaggttagattttttttatattttgttttgtgttatttttttctttaacatccctaaaattttccttacatgttttactagccagatttttcctcctctcctgactactcccagtcatagctgtccctcttctcttatggagatccctcgacctgcagcccaagcttggcgtaatcatggtcatagctgtttcctgtgtgaaattgttatccgctcacaattccacacaacatacgagccggaagcataaagtgtaaagcctggggtgcctaatgagtgagctaactcacattaattgcgttgcgctcactgcccgctttccagtcgggaaacctgtcgtgccagcggatccgcatctcaattagtcagcaaccatagtcccgcccctaactccgcccatcccgcccctaactccgcccagttccgcccattctccgccccatggctgactaattttttttatttatgcagaggccgaggccgcctcggcctctgagctattccagaagtagtgaggaggcttttttggaggcctaggcttttgcaaaaagctaacttgtttattgcagcttataatggttacaaataaagcaatagcatcacaaatttcacaaataaagcatttttttcactgcattctagttgtggtttgtccaaactcatcaatgtatcttatcatgtctggatccgctgcattaatgaatcggccaacgcgcggggagaggcggtttgcgtattgggcgctcttccgcttcctcgctcactgactcgctgcgctcggtcgttcggctgcggcgagcggtatcagctcactcaaaggcggtaatacggttatccacagaatcaggggataacgcaggaaagaacatgtgagcaaaaggccagcaaaaggccaggaaccgtaaaaaggccgcgttgctggcgtttttccataggctccgcccccctgacgagcatcacaaaaatcgacgctcaagtcagaggtggcgaaacccgacaggactataaagataccaggcgtttccccctggaagctccctcgtgcgctctcctgttccgaccctgccgcttaccggatacctgtccgcctttctcccttcgggaagcgtggcgctttctcatagctcacgctgtaggtatctcagttcggtgtaggtcgttcgctccaagctgggctgtgtgcacgaaccccccgttcagcccgaccgctgcgccttatccggtaactatcgtcttgagtccaacccggtaagacacgacttatcgccactggcagcagccactggtaacaggattagcagagcgaggtatgtaggcggtgctacagagttcttgaagtggtggcctaactacggctacactagaagaacagtatttggtatctgcgctctgctgaagccagttaccttcggaaaaagagttggtagctcttgatccggcaaacaaaccaccgctggtagcggtggtttttttgtttgcaagcagcagattacgcgcagaaaaaaaggatctcaagaagatcctttgatcttttctacggggtctgacgctcagtggaacgaaaactcacgttaagggattttggtcatgagattatcaaaaaggatcttcacctagatccttttaaattaaaaatgaagttttaaatcaatctaaagtatatatgagtaaacttggtctgacagttaccaatgcttaatcagtgaggcacctatctcagcgatctgtctatttcgttcatccatagttgcctgactccccgtcgtgtagataactacgatacgggagggcttaccatctggccccagtgctgcaatgataccgcgagacccacgctcaccggctccagatttatcagcaataaaccagccagccggaagggccgagcgcagaagtggtcctgcaactttatccgcctccatccagtctattaattgttgccgggaagctagagtaagtagttcgccagttaatagtttgcgcaacgttgttgccattgctacaggcatcgtggtgtcacgctcgtcgtttggtatggcttcattcagctccggttcccaacgatcaaggcgagttacatgatcccccatgttgtgcaaaaaagcggttagctccttcggtcctccgatcgttgtcagaagtaagttggccgcagtgttatcactcatggttatggcagcactgcataattctcttactgtcatgccatccgtaagatgcttttctgtgactggtgagtactcaaccaagtcattctgagaatagtgtatgcggcgaccgagttgctcttgcccggcgtcaatacgggataataccgcgccacatagcagaactttaaaagtgctcatcattggaaaacgttcttcggggcgaaaactctcaaggatcttaccgctgttgagatccagttcgatgtaacccactcgtgcacccaactgatcttcagcatcttttactttcaccagcgtttctgggtgagcaaaaacaggaaggcaaaatgccgcaaaaaagggaataagggcgacacggaaatgttgaatactcatactcttcctttttcaatattattgaagcatttatcagggttattgtctcatgagcggatacatatttgaatgtatttagaaaaataaacaaataggggttccgcgcacatttccccgaaaagtgccacctgggtcgacattgattattgactagtaatagtaatcaattacggggtcattagttcatagcccatatatggagttccg

SEQ ID NO: 196 - DNA, 4558 bp, synthetic construct
  misc_feature 1..4558: note = Synthetic
  source 1..4558: mol_type = other DNA
tcgcgcgtttcggtgatgacggtgaaaacctctgacacatgcagctcccggagacggtcacagcttgtctgtaagcggatgccgggagcagacaagcccgtcagggcgcgtcagcgggtgttggcgggtgtcggggctggcttaactatgcggcatcagagcagattgtactgagagtgcaccatatgcggtgtgaaataccgcacagatgcgtaaggagaaaataccgcatcaggcgccattcgccattcaggctgcgcaactgttgggaagggcgatcggtgcgggcctcttcgctattacgccagctggcgaaagggggatgtgctgcaaggcgattaagttgggtaacgccagggttttcccagtcacgacgttgtaaaacgacggccagtgaattgacgcgtattgggatcaatggctggtactataattcccctggttgctgaagcggtaaaagtgcgtcaactagttttgtgactttacccataactttgccgttactggaaccataactttgccgtcaacaacactacaaccctcattcttgcgtcagctaattttggatgaaattgacagtttggaaccataactttgccgctagtccaaattggaaggataagcttgccgtgagtccaatcaagcatagaaagcaggaaaacgccgaatttttttagaatggagcagaagccggggatcctaggtcttgaaaggagtgggaattggctccggtgcccgtcagtgggcagagcgcacatcgcccacagtccccgagaagttggggggaggggtcggcaattgatccggtgcctagagaaggtggcgcggggtaaactgggaaagtgatgtcgtgtactggctccgcctttttcccgagggtgggggagaaccgtatataagtgcagtagtcgccgtgaacgttctttttcgcaacgggtttgccgccagaacacaggaccggttctagagcgctgccaccatgaccgagtacaagcccacggtgcgcctcgccacccgcgacgacgtccccagggccgtacgcaccctcgccgccgcgttcgccgactaccccgccacgcgccacaccgtcgatccggaccgccacatcgagcgggtcaccgagctgcaagaactcttcctcacgcgcgtcgggctcgacatcggcaaggtgtgggtcgcggacgacggcgccgcggtggcggtctggaccacgccggagagcgtcgaagcgggggcggtgttcgccgagatcggcccgcgcatggccgagttgagcggttcccggctggccgcgcagcaacagatggaaggcctcctggcgccgcaccggcccaaggagcccgcgtggttcctggccaccgtcggcgtctcgcccgaccaccagggcaagggtctgggcagcgccgtcgtgctccccggagtggaggcggccgagcgcgccggggtgcccgccttcctggagacctccgcgccccgcaacctccccttctacgagcggctcggcttcaccgtcaccgccgacgtcgaggtgcccgaaggaccgcgcacctggtgcatgacccgcaagcccggtgcctgattctaaataaaggaaatttattttcattgcaatagtgtgttggaattttttgtgtctctcagagtccacgacgtgagtttggtttgtaagctgttatatgtaaaactagaacagcttatataactggaaccataaccttgccaccctttattggaagcataagcttgccgttgcggcaaagttatgggtaaagtcacatctaagctgtctctagcctttatttactgaatgggcagtaccagactcgaactgatgacaatcccaatggcgcgccgagcttggcgtaatcatggtcatagctgtttcctgtgtgaaattgttatccgctcacaattccacacaacatacgagccggaagcataaagtgtaaagcctggggtgcctaatgagtgagctaactcacattaattgcgttgcgctcactgcccgctttccagtcgggaaacctgtcgtgccagctgcattaatgaatcggccaacgcgcggggagaggcggtttgcgtattgggcgctcttccgcttcctcgctcactgactcgctgcgctcggtcgttcggctgcggcgagcggtatcagctcactcaaaggcggtaatacggttatccacagaatcaggggataacgcaggaaagaacatgtgagcaaaaggccagcaaaaggccagtaagatacattgatgagtttggacaaaccacaactagaatgcagtgaaaaaaatgctttatttgtgaaatttgtgatgctattgctttatttgtaaccattataagctgcaataaacaagttagctttttgcaaaagcctaggcctccaaaaaagcctcctcactacttctggaatagctcagaggcagaggcggcctcggcctctgcataaataaaaaaaattagtcagccatggggcggagaatgggcggaactgggcggagttaggggcgggatgggcggagttaggggcgggactatggttgctgactaattgagatgcatgctttgcatacttctgcctgctggggagcctggggactttccacacctggttgctgactaattgagatgcatgctttgcatacttctgcctgctggggagcctggggactttccacaccctaactgacacacgaaccgtaaaaaggccgcgttgctggcgtttttccataggctccgcccccctgacgagcatcacaaaatcacaaaaatcgacgctcaagtcagaggtggcgaaacccgacaggactataaagataccaggcgtttccccctggaagctccctcgtgcgctctcctgttccgaccctgccgcttaccggatacctgtccgcctttctcccttcgggaagcgtggcgctttctcatagctcacgctgtaggtatctcagttcggtgtaggtcgttcgctccaagctgggctgtgtgcacgaaccccccgttcagcccgaccgctgcgccttatccggtaactatcgtcttgagtccaacccggtaagacacgacttatcgccactggcagcagccactggtaacaggattagcagagcgaggtatgtaggcggtgctacagagttcttgaagtggtggcctaactacggctacactagaagaacagtatttggtatctgcgctctgctgaagccagttaccttcggaaaaagagttggtagctcttgatccggcaaacaaaccaccgctggtagcggtggtttttttgtttgcaagcagcagattacgcgcagaaaaaaaggatctcaagaagatcctttgatcttttctacggggtctgacgctcagtggaacgaaaactcacgttaagggattttggtcatgagattatcaaaaaggatcttcacctagatccttttaaattaaaaatgaagttttaaatcaatctaaagtatatatgagtaaacttggtctgacagttaccaatgcttaatcagtgaggcacctatctcagcgatctgtctatttcgttcatccatagttgcctgactccccgtcgtgtagataactacgatacgggagggcttaccatctggccccagtgctgcaatgataccgcgagacccacgctcaccggctccagatttatcagcaataaaccagccagccggaagggccgagcgcagaagtggtcctgcaactttatccgcctccatccagtctattaattgttgccgggaagctagagtaagtagttcgccagttaatagtttgcgcaacgttgttgccattgctacaggcatcgtggtgtcacgctcgtcgtttggtatggcttcattcagctccggttcccaacgatcaaggcgagttacatgatcccccatgttgtgcaaaaaagcggttagctccttcggtcctccgatcgttgtcagaagtaagttggccgcagtgttatcactcatggttatggcagcactgcataattctcttactgtcatgccatccgtaagatgcttttctgtgactggtgagtactcaaccaagtcattctgagaatagtgtatgcggcgaccgagttgctcttgcccggcgtcaatacgggataataccgcgccacatagcagaactttaaaagtgctcatcattggaaaacgttcttcggggcgaaaactctcaaggatcttaccgctgttgagatccagttcgatgtaacccactcgtgcacccaactgatcttcagcatcttttactttcaccagcgtttctgggtgagcaaaaacaggaaggcaaaatgccgcaaaaaagggaataagggcgacacggaaatgttgaatactcatactcttcctttttcaatattattgaagcatttatcagggttattgtctcatgagcggatacatatttgaatgtatttagaaaaataaacaaataggggttccgcgcacatttccccgaaaagtgccacctgacgtctaagaaaccattattatcatgacattaacctataaaaataggcgtatcacgaggccctttcgtc

SEQ ID NO: 197 - DNA, 3003 bp, synthetic construct
  misc_feature 1..3003: note = Synthetic
  source 1..3003: mol_type = other DNA
aattctgtggaatgtgtgtcagttagggtgtggaaagtccccaggctccccagcaggcagaagtatgcaaagcatgcatctcaattagtcagcaaccaggtgtggaaagtccccaggctccccagcaggcagaagtatgcaaagcatgcatctcaattagtcagcaaccatagtcccgcccctaactccgcccatcccgcccctaactccgcccagttccgcccattctccgccccatggctgactaattttttttatttatgcagaggccgaggccgcctctgcctctgagctattccagaagtagtgaggaggcttttttggaggcctaggcttttgcaaaaagctaacttgtttattgcagcttataatggttacaaataaagcaatagcatcacaaatttcacaaataaagcatttttttcactgcattctagttgtggtttgtccaaactcatcaatgtatcttatcatgtctgtataccgtcgacctctagctagagcttggcgtaatcatggtcatagctgtttcctgtgtgaaattgttatccgctcacaattccacacaacatacgagccggaagcataaagtgtaaagcctggggtgcctaatgagtgagctaactcacattaattgcgttgcgctcactgcccgctttccagtcgggaaacctgtcgtgccagctgcattaatgaatcggccaacgcgcggggagaggcggtttgcgtattgggcgctcttccgcttcctcgctcactgactcgctgcgctcggtcgttcggctgcggcgagcggtatcagctcactcaaaggcggtaatacggttatccacagaatcaggggataacgcaggaaagaacatgtgagcaaaaggccagcaaaaggccaggaaccgtaaaaaggccgcgttgctggcgtttttccataggctccgcccccctgacgagcatcacaaaaatcgacgctcaagtcagaggtggcgaaacccgacaggactataaagataccaggcgtttccccctggaagctccctcgtgcgctctcctgttccgaccctgccgcttaccggatacctgtccgcctttctcccttcgggaagcgtggcgctttctcatagctcacgctgtaggtatctcagttcggtgtaggtcgttcgctccaagctgggctgtgtgcacgaaccccccgttcagcccgaccgctgcgccttatccggtaactatcgtcttgagtccaacccggtaagacacgacttatcgccactggcagcagccactggtaacaggattagcagagcgaggtatgtaggcggtgctacagagttcttgaagtggtggcctaactacggctacactagaagaacagtatttggtatctgcgctctgctgaagccagttaccttcggaaaaagagttggtagctcttgatccggcaaacaaaccaccgctggtagcggtttttttgtttgcaagcagcagattacgcgcagaaaaaaaggatctcaagaagatcctttgatcttttctacggggtctgacgctcagtggaacgaaaactcacgttaagggattttggtcatgagattatcaaaaaggatcttcacctagatccttttaaattaaaaatgaagttttaaatcaatctaaagtatatatgagtaaacttggtctgacagttaccaatgcttaatcagtgaggcacctatctcagcgatctgtctatttcgttcatccatagttgcctgactccccgtcgtgtagataactacgatacgggagggcttaccatctggccccagtgctgcaatgataccgcgagacccacgctcaccggctccagatttatcagcaataaaccagccagccggaagggccgagcgcagaagtggtcctgcaactttatccgcctccatccagtctattaattgttgccgggaagctagagtaagtagttcgccagttaatagtttgcgcaacgttgttgccattgctacaggcatcgtggtgtcacgctcgtcgtttggtatggcttcattcagctccggttcccaacgatcaaggcgagttacatgatcccccatgttgtgcaaaaaagcggttagctccttcggtcctccgatcgttgtcagaagtaagttggccgcagtgttatcactcatggttatggcagcactgcataattctcttactgtcatgccatccgtaagatgcttttctgtgactggtgagtactcaaccaagtcattctgagaatagtgtatgcggcgaccgagttgctcttgcccggcgtcaatacgggataataccgcgccacatagcagaactttaaaagtgctcatcattggaaaacgttcttcggggcgaaaactctcaaggatcttaccgctgttgagatccagttcgatgtaacccactcgtgcacccaactgatcttcagcatcttttactttcaccagcgtttctgggtgagcaaaaacaggaaggcaaaatgccgcaaaaaagggaataagggcgacacggaaatgttgaatactcatactcttcctttttcaatattattgaagcatttatcagggttattgtctcatgagcggatacatatttgaatgtatttagaaaaataaacaaataggggttccgcgcacatttccccgaaaagtgccacctgagggcctatttcccatgattccttcatatttgcatatacgatacaaggctgttagagagataattagaattaatttgactgtaaacacaaagatattagtacaaaatacgtgacgtagaaagtaataatttcttgggtagtttgcagttttaaaattatgttttaaaatggactatcatatgcttaccgtaacttgaaagtatttcgatttcttggctttatatatcttgtggaaaggacgtgagtcgtggctttatgccgttaggcgttgctcaaagtcttctctgaagacagtgagtcgtggctttatgccgttaggcgttgctcaatttttt

SEQ ID NO: 198 - DNA, 3021 bp, synthetic construct
  misc_feature 1..3021: note = Synthetic
  source 1..3021: mol_type = other DNA
aattctgtggaatgtgtgtcagttagggtgtggaaagtccccaggctccccagcaggcagaagtatgcaaagcatgcatctcaattagtcagcaaccaggtgtggaaagtccccaggctccccagcaggcagaagtatgcaaagcatgcatctcaattagtcagcaaccatagtcccgcccctaactccgcccatcccgcccctaactccgcccagttccgcccattctccgccccatggctgactaattttttttatttatgcagaggccgaggccgcctctgcctctgagctattccagaagtagtgaggaggcttttttggaggcctaggcttttgcaaaaagctaacttgtttattgcagcttataatggttacaaataaagcaatagcatcacaaatttcacaaataaagcatttttttcactgcattctagttgtggtttgtccaaactcatcaatgtatcttatcatgtctgtataccgtcgacctctagctagagcttggcgtaatcatggtcatagctgtttcctgtgtgaaattgttatccgctcacaattccacacaacatacgagccggaagcataaagtgtaaagcctggggtgcctaatgagtgagctaactcacattaattgcgttgcgctcactgcccgctttccagtcgggaaacctgtcgtgccagctgcattaatgaatcggccaacgcgcggggagaggcggtttgcgtattgggcgctcttccgcttcctcgctcactgactcgctgcgctcggtcgttcggctgcggcgagcggtatcagctcactcaaaggcggtaatacggttatccacagaatcaggggataacgcaggaaagaacatgtgagcaaaaggccagcaaaaggccaggaaccgtaaaaaggccgcgttgctggcgtttttccataggctccgcccccctgacgagcatcacaaaaatcgacgctcaagtcagaggtggcgaaacccgacaggactataaagataccaggcgtttccccctggaagctccctcgtgcgctctcctgttccgaccctgccgcttaccggatacctgtccgcctttctcccttcgggaagcgtggcgctttctcatagctcacgctgtaggtatctcagttcggtgtaggtcgttcgctccaagctgggctgtgtgcacgaaccccccgttcagcccgaccgctgcgccttatccggtaactatcgtcttgagtccaacccggtaagacacgacttatcgccactggcagcagccactggtaacaggattagcagagcgaggtatgtaggcggtgctacagagttcttgaagtggtggcctaactacggctacactagaagaacagtatttggtatctgcgctctgctgaagccagttaccttcggaaaaagagttggtagctcttgatccggcaaacaaaccaccgctggtagcggtttttttgtttgcaagcagcagattacgcgcagaaaaaaaggatctcaagaagatcctttgatcttttctacggggtctgacgctcagtggaacgaaaactcacgttaagggattttggtcatgagattatcaaaaaggatcttcacctagatccttttaaattaaaaatgaagttttaaatcaatctaaagtatatatgagtaaacttggtctgacagttaccaatgcttaatcagtgaggcacctatctcagcgatctgtctatttcgttcatccatagttgcctgactccccgtcgtgtagataactacgatacgggagggcttaccatctggccccagtgctgcaatgataccgcgagacccacgctcaccggctccagatttatcagcaataaaccagccagccggaagggccgagcgcagaagtggtcctgcaactttatccgcctccatccagtctattaattgttgccgggaagctagagtaagtagttcgccagttaatagtttgcgcaacgttgttgccattgctacaggcatcgtggtgtcacgctcgtcgtttggtatggcttcattcagctccggttcccaacgatcaaggcgagttacatgatcccccatgttgtgcaaaaaagcggttagctccttcggtcctccgatcgttgtcagaagtaagttggccgcagtgttatcactcatggttatggcagcactgcataattctcttactgtcatgccatccgtaagatgcttttctgtgactggtgagtactcaaccaagtcattctgagaatagtgtatgcggcgaccgagttgctcttgcccggcgtcaatacgggataataccgcgccacatagcagaactttaaaagtgctcatcattggaaaacgttcttcggggcgaaaactctcaaggatcttaccgctgttgagatccagttcgatgtaacccactcgtgcacccaactgatcttcagcatcttttactttcaccagcgtttctgggtgagcaaaaacaggaaggcaaaatgccgcaaaaaagggaataagggcgacacggaaatgttgaatactcatactcttcctttttcaatattattgaagcatttatcagggttattgtctcatgagcggatacatatttgaatgtatttagaaaaataaacaaataggggttccgcgcacatttccccgaaaagtgccacctgagggcctatttcccatgattccttcatatttgcatatacgatacaaggctgttagagagataattagaattaatttgactgtaaacacaaagatattagtacaaaatacgtgacgtagaaagtaataatttcttgggtagtttgcagttttaaaattatgttttaaaatggactatcatatgcttaccgtaacttgaaagtatttcgatttcttggctttatatatcttgtggaaaggacgtgagtcgtggctttatgccgttaggcgttgctcaagggaggacatcgatgtcacctccaatgactagggtgtgagtcgtggctttatgccgttaggcgttgctcaatttttt

SEQ ID NO: 199 - DNA, 3021 bp, synthetic construct
  misc_feature 1..3021: note = Synthetic
  source 1..3021: mol_type = other DNA
aattctgtggaatgtgtgtcagttagggtgtggaaagtccccaggctccccagcaggcagaagtatgcaaagcatgcatctcaattagtcagcaaccaggtgtggaaagtccccaggctccccagcaggcagaagtatgcaaagcatgcatctcaattagtcagcaaccatagtcccgcccctaactccgcccatcccgcccctaactccgcccagttccgcccattctccgccccatggctgactaattttttttatttatgcagaggccgaggccgcctctgcctctgagctattccagaagtagtgaggaggcttttttggaggcctaggcttttgcaaaaagctaacttgtttattgcagcttataatggttacaaataaagcaatagcatcacaaatttcacaaataaagcatttttttcactgcattctagttgtggtttgtccaaactcatcaatgtatcttatcatgtctgtataccgtcgacctctagctagagcttggcgtaatcatggtcatagctgtttcctgtgtgaaattgttatccgctcacaattccacacaacatacgagccggaagcataaagtgtaaagcctggggtgcctaatgagtgagctaactcacattaattgcgttgcgctcactgcccgctttccagtcgggaaacctgtcgtgccagctgcattaatgaatcggccaacgcgcggggagaggcggtttgcgtattgggcgctcttccgcttcctcgctcactgactcgctgcgctcggtcgttcggctgcggcgagcggtatcagctcactcaaaggcggtaatacggttatccacagaatcaggggataacgcaggaaagaacatgtgagcaaaaggccagcaaaaggccaggaaccgtaaaaaggccgcgttgctggcgtttttccataggctccgcccccctgacgagcatcacaaaaatcgacgctcaagtcagaggtggcgaaacccgacaggactataaagataccaggcgtttccccctggaagctccctcgtgcgctctcctgttccgaccctgccgcttaccggatacctgtccgcctttctcccttcgggaagcgtggcgctttctcatagctcacgctgtaggtatctcagttcggtgtaggtcgttcgctccaagctgggctgtgtgcacgaaccccccgttcagcccgaccgctgcgccttatccggtaactatcgtcttgagtccaacccggtaagacacgacttatcgccactggcagcagccactggtaacaggattagcagagcgaggtatgtaggcggtgctacagagttcttgaagtggtggcctaactacggctacactagaagaacagtatttggtatctgcgctctgctgaagccagttaccttcggaaaaagagttggtagctcttgatccggcaaacaaaccaccgctggtagcggtttttttgtttgcaagcagcagattacgcgcagaaaaaaaggatctcaagaagatcctttgatcttttctacggggtctgacgctcagtggaacgaaaactcacgttaagggattttggtcatgagattatcaaaaaggatcttcacctagatccttttaaattaaaaatgaagttttaaatcaatctaaagtatatatgagtaaacttggtctgacagttaccaatgcttaatcagtgaggcacctatctcagcgatctgtctatttcgttcatccatagttgcctgactccccgtcgtgtagataactacgatacgggagggcttaccatctggccccagtgctgcaatgataccgcgagacccacgctcaccggctccagatttatcagcaataaaccagccagccggaagggccgagcgcagaagtggtcctgcaactttatccgcctccatccagtctattaattgttgccgggaagctagagtaagtagttcgccagttaatagtttgcgcaacgttgttgccattgctacaggcatcgtggtgtcacgctcgtcgtttggtatggcttcattcagctccggttcccaacgatcaaggcgagttacatgatcccccatgttgtgcaaaaaagcggttagctccttcggtcctccgatcgttgtcagaagtaagttggccgcagtgttatcactcatggttatggcagcactgcataattctcttactgtcatgccatccgtaagatgcttttctgtgactggtgagtactcaaccaagtcattctgagaatagtgtatgcggcgaccgagttgctcttgcccggcgtcaatacgggataataccgcgccacatagcagaactttaaaagtgctcatcattggaaaacgttcttcggggcgaaaactctcaaggatcttaccgctgttgagatccagttcgatgtaacccactcgtgcacccaactgatcttcagcatcttttactttcaccagcgtttctgggtgagcaaaaacaggaaggcaaaatgccgcaaaaaagggaataagggcgacacggaaatgttgaatactcatactcttcctttttcaatattattgaagcatttatcagggttattgtctcatgagcggatacatatttgaatgtatttagaaaaataaacaaataggggttccgcgcacatttccccgaaaagtgccacctgagggcctatttcccatgattccttcatatttgcatatacgatacaaggctgttagagagataattagaattaatttgactgtaaacacaaagatattagtacaaaatacgtgacgtagaaagtaataatttcttgggtagtttgcagttttaaaattatgttttaaaatggactatcatatgcttaccgtaacttgaaagtatttcgatttcttggctttatatatcttgtggaaaggacgtgagtcgtggctttatgccgttaggcgttgctcaattaacagctgacccaataagtggcagagtgctaaggtgagtcgtggctttatgccgttaggcgttgctcaatttttt

SEQ ID NO: 200 - DNA, 3021 bp, synthetic construct
  misc_feature 1..3021: note = Synthetic
  source 1..3021: mol_type = other DNA
aattctgtggaatgtgtgtcagttagggtgtggaaagtccccaggctccccagcaggcagaagtatgcaaagcatgcatctcaattagtcagcaaccaggtgtggaaagtccccaggctccccagcaggcagaagtatgcaaagcatgcatctcaattagtcagcaaccatagtcccgcccctaactccgcccatcccgcccctaactccgcccagttccgcccattctccgccccatggctgactaattttttttatttatgcagaggccgaggccgcctctgcctctgagctattccagaagtagtgaggaggcttttttggaggcctaggcttttgcaaaaagctaacttgtttattgcagcttataatggttacaaataaagcaatagcatcacaaatttcacaaataaagcatttttttcactgcattctagttgtggtttgtccaaactcatcaatgtatcttatcatgtctgtataccgtcgacctctagctagagcttggcgtaatcatggtcatagctgtttcctgtgtgaaattgttatccgctcacaattccacacaacatacgagccggaagcataaagtgtaaagcctggggtgcctaatgagtgagctaactcacattaattgcgttgcgctcactgcccgctttccagtcgggaaacctgtcgtgccagctgcattaatgaatcggccaacgcgcggggagaggcggtttgcgtattgggcgctcttccgcttcctcgctcactgactcgctgcgctcggtcgttcggctgcggcgagcggtatcagctcactcaaaggcggtaatacggttatccacagaatcaggggataacgcaggaaagaacatgtgagcaaaaggccagcaaaaggccaggaaccgtaaaaaggccgcgttgctggcgtttttccataggctccgcccccctgacgagcatcacaaaaatcgacgctcaagtcagaggtggcgaaacccgacaggactataaagataccaggcgtttccccctggaagctccctcgtgcgctctcctgttccgaccctgccgcttaccggatacctgtccgcctttctcccttcgggaagcgtggcgctttctcatagctcacgctgtaggtatctcagttcggtgtaggtcgttcgctccaagctgggctgtgtgcacgaaccccccgttcagcccgaccgctgcgccttatccggtaactatcgtcttgagtccaacccggtaagacacgacttatcgccactggcagcagccactggtaacaggattagcagagcgaggtatgtaggcggtgctacagagttcttgaagtggtggcctaactacggctacactagaagaacagtatttggtatctgcgctctgctgaagccagttaccttcggaaaaagagttggtagctcttgatccggcaaacaaaccaccgctggtagcggtttttttgtttgcaagcagcagattacgcgcagaaaaaaaggatctcaagaagatcctttgatcttttctacggggtctgacgctcagtggaacgaaaactcacgttaagggattttggtcatgagattatcaaaaaggatcttcacctagatccttttaaattaaaaatgaagttttaaatcaatctaaagtatatatgagtaaacttggtctgacagttaccaatgcttaatcagtgaggcacctatctcagcgatctgtctatttcgttcatccatagttgcctgactccccgtcgtgtagataactacgatacgggagggcttaccatctggccccagtgctgcaatgataccgcgagacccacgctcaccggctccagatttatcagcaataaaccagccagccggaagggccgagcgcagaagtggtcctgcaactttatccgcctccatccagtctattaattgttgccgggaagctagagtaagtagttcgccagttaatagtttgcgcaacgttgttgccattgctacaggcatcgtggtgtcacgctcgtcgtttggtatggcttcattcagctccggttcccaacgatcaaggcgagttacatgatcccccatgttgtgcaaaaaagcggttagctccttcggtcctccgatcgttgtcagaagtaagttggccgcagtgttatcactcatggttatggcagcactgcataattctcttactgtcatgccatccgtaagatgcttttctgtgactggtgagtactcaaccaagtcattctgagaatagtgtatgcggcgaccgagttgctcttgcccggcgtcaatacgggataataccgcgccacatagcagaactttaaaagtgctcatcattggaaaacgttcttcggggcgaaaactctcaaggatcttaccgctgttgagatccagttcgatgtaacccactcgtgcacccaactgatcttcagcatcttttactttcaccagcgtttctgggtgagcaaaaacaggaaggcaaaatgccgcaaaaaagggaataagggcgacacggaaatgttgaatactcatactcttcctttttcaatattattgaagcatttatcagggttattgtctcatgagcggatacatatttgaatgtatttagaaaaataaacaaataggggttccgcgcacatttccccgaaaagtgccacctgagggcctatttcccatgattccttcatatttgcatatacgatacaaggctgttagagagataattagaattaatttgactgtaaacacaaagatattagtacaaaatacgtgacgtagaaagtaataatttcttgggtagtttgcagttttaaaattatgttttaaaatggactatcatatgcttaccgtaacttgaaagtatttcgatttcttggctttatatatcttgtggaaaggacgtgagtcgtggctttatgccgttaggcgttgctcaagaccatcaggaaacattaacgtactgatgttaacagtgagtcgtggctttatgccgttaggcgttgctcaatttttt

SEQ ID NO: 201 - DNA, 3021 bp, synthetic construct
  misc_feature 1..3021: note = Synthetic
  source 1..3021: mol_type = other DNA
aattctgtggaatgtgtgtcagttagggtgtggaaagtccccaggctccccagcaggcagaagtatgcaaagcatgcatctcaattagtcagcaaccaggtgtggaaagtccccaggctccccagcaggcagaagtatgcaaagcatgcatctcaattagtcagcaaccatagtcccgcccctaactccgcccatcccgcccctaactccgcccagttccgcccattctccgccccatggctgactaattttttttatttatgcagaggccgaggccgcctctgcctctgagctattccagaagtagtgaggaggcttttttggaggcctaggcttttgcaaaaagctaacttgtttattgcagcttataatggttacaaataaagcaatagcatcacaaatttcacaaataaagcatttttttcactgcattctagttgtggtttgtccaaactcatcaatgtatcttatcatgtctgtataccgtcgacctctagctagagcttggcgtaatcatggtcatagctgtttcctgtgtgaaattgttatccgctcacaattccacacaacatacgagccggaagcataaagtgtaaagcctggggtgcctaatgagtgagctaactcacattaattgcgttgcgctcactgcccgctttccagtcgggaaacctgtcgtgccagctgcattaatgaatcggccaacgcgcggggagaggcggtttgcgtattgggcgctcttccgcttcctcgctcactgactcgctgcgctcggtcgttcggctgcggcgagcggtatcagctcactcaaaggcggtaatacggttatccacagaatcaggggataacgcaggaaagaacatgtgagcaaaaggccagcaaaaggccaggaaccgtaaaaaggccgcgttgctggcgtttttccataggctccgcccccctgacgagcatcacaaaaatcgacgctcaagtcagaggtggcgaaacccgacaggactataaagataccaggcgtttccccctggaagctccctcgtgcgctctcctgttccgaccctgccgcttaccggatacctgtccgcctttctcccttcgggaagcgtggcgctttctcatagctcacgctgtaggtatctcagttcggtgtaggtcgttcgctccaagctgggctgtgtgcacgaaccccccgttcagcccgaccgctgcgccttatccggtaactatcgtcttgagtccaacccggtaagacacgacttatcgccactggcagcagccactggtaacaggattagcagagcgaggtatgtaggcggtgctacagagttcttgaagtggtggcctaactacggctacactagaagaacagtatttggtatctgcgctctgctgaagccagttaccttcggaaaaagagttggtagctcttgatccggcaaacaaaccaccgctggtagcggtttttttgtttgcaagcagcagattacgcgcagaaaaaaaggatctcaagaagatcctttgatcttttctacggggtctgacgctcagtggaacgaaaactcacgttaagggattttggtcatgagattatcaaaaaggatcttcacctagatccttttaaattaaaaatgaagttttaaatcaatctaaagtatatatgagtaaacttggtctgacagttaccaatgcttaatcagtgaggcacctatctcagcgatctgtctatttcgttcatccatagttgcctgactccccgtcgtgtagataactacgatacgggagggcttaccatctggccccagtgctgcaatgataccgcgagacccacgctcaccggctccagatttatcagcaataaaccagccagccggaagggccgagcgcagaagtggtcctgcaactttatccgcctccatccagtctattaattgttgccgggaagctagagtaagtagttcgccagttaatagtttgcgcaacgttgttgccattgctacaggcatcgtggtgtcacgctcgtcgtttggtatggcttcattcagctccggttcccaacgatcaaggcgagttacatgatcccccatgttgtgcaaaaaagcggttagctccttcggtcctccgatcgttgtcagaagtaagttggccgcagtgttatcactcatggttatggcagcactgcataattctcttactgtcatgccatccgtaagatgcttttctgtgactggtgagtactcaaccaagtcattctgagaatagtgtatgcggcgaccgagttgctcttgcccggcgtcaatacgggataataccgcgccacatagcagaactttaaaagtgctcatcattggaaaacgttcttcggggcgaaaactctcaaggatcttaccgctgttgagatccagttcgatgtaacccactcgtgcacccaactgatcttcagcatcttttactttcaccagcgtttctgggtgagcaaaaacaggaaggcaaaatgccgcaaaaaagggaataagggcgacacggaaatgttgaatactcatactcttcctttttcaatattattgaagcatttatcagggttattgtctcatgagcggatacatatttgaatgtatttagaaaaataaacaaataggggttccgcgcacatttccccgaaaagtgccacctgagggcctatttcccatgattccttcatatttgcatatacgatacaaggctgttagagagataattagaattaatttgactgtaaacacaaagatattagtacaaaatacgtgacgtagaaagtaataatttcttgggtagtttgcagttttaaaattatgttttaaaatggactatcatatgcttaccgtaacttgaaagtatttcgatttcttggctttatatatcttgtggaaaggacgtgagtcgtggctttatgccgttaggcgttgctcaattaaaaacacaacatcagtgcatgttggggattccgtgagtcgtggctttatgccgttaggcgttgctcaatttttt

SEQ ID NO: 202 - DNA, 3021 bp, synthetic construct
  misc_feature 1..3021: note = Synthetic
  source 1..3021: mol_type = other DNA
aattctgtggaatgtgtgtcagttagggtgtggaaagtccccaggctccccagcaggcagaagtatgcaaagcatgcatctcaattagtcagcaaccaggtgtggaaagtccccaggctccccagcaggcagaagtatgcaaagcatgcatctcaattagtcagcaaccatagtcccgcccctaactccgcccatcccgcccctaactccgcccagttccgcccattctccgccccatggctgactaattttttttatttatgcagaggccgaggccgcctctgcctctgagctattccagaagtagtgaggaggcttttttggaggcctaggcttttgcaaaaagctaacttgtttattgcagcttataatggttacaaataaagcaatagcatcacaaatttcacaaataaagcatttttttcactgcattctagttgtggtttgtccaaactcatcaatgtatcttatcatgtctgtataccgtcgacctctagctagagcttggcgtaatcatggtcatagctgtttcctgtgtgaaattgttatccgctcacaattccacacaacatacgagccggaagcataaagtgtaaagcctggggtgcctaatgagtgagctaactcacattaattgcgttgcgctcactgcccgctttccagtcgggaaacctgtcgtgccagctgcattaatgaatcggccaacgcgcggggagaggcggtttgcgtattgggcgctcttccgcttcctcgctcactgactcgctgcgctcggtcgttcggctgcggcgagcggtatcagctcactcaaaggcggtaatacggttatccacagaatcaggggataacgcaggaaagaacatgtgagcaaaaggccagcaaaaggccaggaaccgtaaaaaggccgcgttgctggcgtttttccataggctccgcccccctgacgagcatcacaaaaatcgacgctcaagtcagaggtggcgaaacccgacaggactataaagataccaggcgtttccccctggaagctccctcgtgcgctctcctgttccgaccctgccgcttaccggatacctgtccgcctttctcccttcgggaagcgtggcgctttctcatagctcacgctgtaggtatctcagttcggtgtaggtcgttcgctccaagctgggctgtgtgcacgaaccccccgttcagcccgaccgctgcgccttatccggtaactatcgtcttgagtccaacccggtaagacacgacttatcgccactggcagcagccactggtaacaggattagcagagcgaggtatgtaggcggtgctacagagttcttgaagtggtggcctaactacggctacactagaagaacagtatttggtatctgcgctctgctgaagccagttaccttcggaaaaagagttggtagctcttgatccggcaaacaaaccaccgctggtagcggtttttttgtttgcaagcagcagattacgcgcagaaaaaaaggatctcaagaagatcctttgatcttttctacggggtctgacgctcagtggaacgaaaactcacgttaagggattttggtcatgagattatcaaaaaggatcttcacctagatccttttaaattaaaaatgaagttttaaatcaatctaaagtatatatgagtaaacttggtctgacagttaccaatgcttaatcagtgaggcacctatctcagcgatctgtctatttcgttcatccatagttgcctgactccccgtcgtgtagataactacgatacgggagggcttaccatctggccccagtgctgcaatgataccgcgagacccacgctcaccggctccagatttatcagcaataaaccagccagccggaagggccgagcgcagaagtggtcctgcaactttatccgcctccatccagtctattaattgttgccgggaagctagagtaagtagttcgccagttaatagtttgcgcaacgttgttgccattgctacaggcatcgtggtgtcacgctcgtcgtttggtatggcttcattcagctccggttcccaacgatcaaggcgagttacatgatcccccatgttgtgcaaaaaagcggttagctccttcggtcctccgatcgttgtcagaagtaagttggccgcagtgttatcactcatggttatggcagcactgcataattctcttactgtcatgccatccgtaagatgcttttctgtgactggtgagtactcaaccaagtcattctgagaatagtgtatgcggcgaccgagttgctcttgcccggcgtcaatacgggataataccgcgccacatagcagaactttaaaagtgctcatcattggaaaacgttcttcggggcgaaaactctcaaggatcttaccgctgttgagatccagttcgatgtaacccactcgtgcacccaactgatcttcagcatcttttactttcaccagcgtttctgggtgagcaaaaacaggaaggcaaaatgccgcaaaaaagggaataagggcgacacggaaatgttgaatactcatactcttcctttttcaatattattgaagcatttatcagggttattgtctcatgagcggatacatatttgaatgtatttagaaaaataaacaaataggggttccgcgcacatttccccgaaaagtgccacctgagggcctatttcccatgattccttcatatttgcatatacgatacaaggctgttagagagataattagaattaatttgactgtaaacacaaagatattagtacaaaatacgtgacgtagaaagtaataatttcttgggtagtttgcagttttaaaattatgttttaaaatggactatcatatgcttaccgtaacttgaaagtatttcgatttcttggctttatatatcttgtggaaaggacgtgagtcgtggctttatgccgttaggcgttgctcaacggaaggatcccacaatcactctcagaatgttctcgtgagtcgtggctttatgccgttaggcgttgctcaatttttt

SEQ ID NO: 203 - DNA, 3021 bp, synthetic construct
  misc_feature 1..3021: note = Synthetic
  source 1..3021: mol_type = other DNA
aattctgtggaatgtgtgtcagttagggtgtggaaagtccccaggctccccagcaggcagaagtatgcaaagcatgcatctcaattagtcagcaaccaggtgtggaaagtccccaggctccccagcaggcagaagtatgcaaagcatgcatctcaattagtcagcaaccatagtcccgcccctaactccgcccatcccgcccctaactccgcccagttccgcccattctccgccccatggctgactaattttttttatttatgcagaggccgaggccgcctctgcctctgagctattccagaagtagtgaggaggcttttttggaggcctaggcttttgcaaaaagctaacttgtttattgcagcttataatggttacaaataaagcaatagcatcacaaatttcacaaataaagcatttttttcactgcattctagttgtggtttgtccaaactcatcaatgtatcttatcatgtctgtataccgtcgacctctagctagagcttggcgtaatcatggtcatagctgtttcctgtgtgaaattgttatccgctcacaattccacacaacatacgagccggaagcataaagtgtaaagcctggggtgcctaatgagtgagctaactcacattaattgcgttgcgctcactgcccgctttccagtcgggaaacctgtcgtgccagctgcattaatgaatcggccaacgcgcggggagaggcggtttgcgtattgggcgctcttccgcttcctcgctcactgactcgctgcgctcggtcgttcggctgcggcgagcggtatcagctcactcaaaggcggtaatacggttatccacagaatcaggggataacgcaggaaagaacatgtgagcaaaaggccagcaaaaggccaggaaccgtaaaaaggccgcgttgctggcgtttttccataggctccgcccccctgacgagcatcacaaaaatcgacgctcaagtcagaggtggcgaaacccgacaggactataaagataccaggcgtttccccctggaagctccctcgtgcgctctcctgttccgaccctgccgcttaccggatacctgtccgcctttctcccttcgggaagcgtggcgctttctcatagctcacgctgtaggtatctcagttcggtgtaggtcgttcgctccaagctgggctgtgtgcacgaaccccccgttcagcccgaccgctgcgccttatccggtaactatcgtcttgagtccaacccggtaagacacgacttatcgccactggcagcagccactggtaacaggattagcagagcgaggtatgtaggcggtgctacagagttcttgaagtggtggcctaactacggctacactagaagaacagtatttggtatctgcgctctgctgaagccagttaccttcggaaaaagagttggtagctcttgatccggcaaacaaaccaccgctggtagcggtttttttgtttgcaagcagcagattacgcgcagaaaaaaaggatctcaagaagatcctttgatcttttctacggggtctgacgctcagtggaacgaaaactcacgttaagggattttggtcatgagattatcaaaaaggatcttcacctagatccttttaaattaaaaatgaagttttaaatcaatctaaagtatatatgagtaaacttggtctgacagttaccaatgcttaatcagtgaggcacctatctcagcgatctgtctatttcgttcatccatagttgcctgactccccgtcgtgtagataactacgatacgggagggcttaccatctggccccagtgctgcaatgataccgcgagacccacgctcaccggctccagatttatcagcaataaaccagccagccggaagggccgagcgcagaagtggtcctgcaactttatccgcctccatccagtctattaattgttgccgggaagctagagtaagtagttcgccagttaatagtttgcgcaacgttgttgccattgctacaggcatcgtggtgtcacgctcgtcgtttggtatggcttcattcagctccggttcccaacgatcaaggcgagttacatgatcccccatgttgtgcaaaaaagcggttagctccttcggtcctccgatcgttgtcagaagtaagttggccgcagtgttatcactcatggttatggcagcactgcataattctcttactgtcatgccatccgtaagatgcttttctgtgactggtgagtactcaaccaagtcattctgagaatagtgtatgcggcgaccgagttgctcttgcccggcgtcaatacgggataataccgcgccacatagcagaactttaaaagtgctcatcattggaaaacgttcttcggggcgaaaactctcaaggatcttaccgctgttgagatccagttcgatgtaacccactcgtgcacccaactgatcttcagcatcttttactttcaccagcgtttctgggtgagcaaaaacaggaaggcaaaatgccgcaaaaaagggaataagggcgacacggaaatgttgaatactcatactcttcctttttcaatattattgaagcatttatcagggttattgtctcatgagcggatacatatttgaatgtatttagaaaaataaacaaataggggttccgcgcacatttccccgaaaagtgccacctgagggcctatttcccatgattccttcatatttgcatatacgatacaaggctgttagagagataattagaattaatttgactgtaaacacaaagatattagtacaaaatacgtgacgtagaaagtaataatttcttgggtagtttgcagttttaaaattatgttttaaaatggactatcatatgcttaccgtaacttgaaagtatttcgatttcttggctttatatatcttgtggaaaggacgtgagtcgtggctttatgccgttaggcgttgctcaatgactagagagggtccattttgaggatgggggtgtgtgagtcgtggctttatgccgttaggcgttgctcaatttttt

SEQ ID NO: 204 - DNA, 3021 bp, synthetic construct
  misc_feature 1..3021: note = Synthetic
  source 1..3021: mol_type = other DNA
aattctgtggaatgtgtgtcagttagggtgtggaaagtccccaggctccccagcaggcagaagtatgcaaagcatgcatctcaattagtcagcaaccaggtgtggaaagtccccaggctccccagcaggcagaagtatgcaaagcatgcatctcaattagtcagcaaccatagtcccgcccctaactccgcccatcccgcccctaactccgcccagttccgcccattctccgccccatggctgactaattttttttatttatgcagaggccgaggccgcctctgcctctgagctattccagaagtagtgaggaggcttttttggaggcctaggcttttgcaaaaagctaacttgtttattgcagcttataatggttacaaataaagcaatagcatcacaaatttcacaaataaagcatttttttcactgcattctagttgtggtttgtccaaactcatcaatgtatcttatcatgtctgtataccgtcgacctctagctagagcttggcgtaatcatggtcatagctgtttcctgtgtgaaattgttatccgctcacaattccacacaacatacgagccggaagcataaagtgtaaagcctggggtgcctaatgagtgagctaactcacattaattgcgttgcgctcactgcccgctttccagtcgggaaacctgtcgtgccagctgcattaatgaatcggccaacgcgcggggagaggcggtttgcgtattgggcgctcttccgcttcctcgctcactgactcgctgcgctcggtcgttcggctgcggcgagcggtatcagctcactcaaaggcggtaatacggttatccacagaatcaggggataacgcaggaaagaacatgtgagcaaaaggccagcaaaaggccaggaaccgtaaaaaggccgcgttgctggcgtttttccataggctccgcccccctgacgagcatcacaaaaatcgacgctcaagtcagaggtggcgaaacccgacaggactataaagataccaggcgtttccccctggaagctccctcgtgcgctctcctgttccgaccctgccgcttaccggatacctgtccgcctttctcccttcgggaagcgtggcgctttctcatagctcacgctgtaggtatctcagttcggtgtaggtcgttcgctccaagctgggctgtgtgcacgaaccccccgttcagcccgaccgctgcgccttatccggtaactatcgtcttgagtccaacccggtaagacacgacttatcgccactggcagcagccactggtaacaggattagcagagcgaggtatgtaggcggtgctacagagttcttgaagtggtggcctaactacggctacactagaagaacagtatttggtatctgcgctctgctgaagccagttaccttcggaaaaagagttggtagctcttgatccggcaaacaaaccaccgctggtagcggtttttttgtttgcaagcagcagattacgcgcagaaaaaaaggatctcaagaagatcctttgatcttttctacggggtctgacgctcagtggaacgaaaactcacgttaagggattttggtcatgagattatcaaaaaggatcttcacctagatccttttaaattaaaaatgaagttttaaatcaatctaaagtatatatgagtaaacttggtctgacagttaccaatgcttaatcagtgaggcacctatctcagcgatctgtctatttcgttcatccatagttgcctgactccccgtcgtgtagataactacgatacgggagggcttaccatctggccccagtgctgcaatgataccgcgagacccacgctcaccggctccagatttatcagcaataaaccagccagccggaagggccgagcgcagaagtggtcctgcaactttatccgcctccatccagtctattaattgttgccgggaagctagagtaagtagttcgccagttaatagtttgcgcaacgttgttgccattgctacaggcatcgtggtgtcacgctcgtcgtttggtatggcttcattcagctccggttcccaacgatcaaggcgagttacatgatcccccatgttgtgcaaaaaagcggttagctccttcggtcctccgatcgttgtcagaagtaagttggccgcagtgttatcactcatggttatggcagcactgcataattctcttactgtcatgccatccgtaagatgcttttctgtgactggtgagtactcaaccaagtcattctgagaatagtgtatgcggcgaccgagttgctcttgcccggcgtcaatacgggataataccgcgccacatagcagaactttaaaagtgctcatcattggaaaacgttcttcggggcgaaaactctcaaggatcttaccgctgttgagatccagttcgatgtaacccactcgtgcacccaactgatcttcagcatcttttactttcaccagcgtttctgggtgagcaaaaacaggaaggcaaaatgccgcaaaaaagggaataagggcgacacggaaatgttgaatactcatactcttcctttttcaatattattgaagcatttatcagggttattgtctcatgagcggatacatatttgaatgtatttagaaaaataaacaaataggggttccgcgcacatttccccgaaaagtgccacctgagggcctatttcccatgattccttcatatttgcatatacgatacaaggctgttagagagataattagaattaatttgactgtaaacacaaagatattagtacaaaatacgtgacgtagaaagtaataatttcttgggtagtttgcagttttaaaattatgttttaaaatggactatcatatgcttaccgtaacttgaaagtatttcgatttcttggctttatatatcttgtggaaaggacgtgagtcgtggctttatgccgttaggcgttgctcaacccatgccttgctctctttctgtcctcagtggtccgtgagtcgtggctttatgccgttaggcgttgctcaatttttt

SEQ ID NO: 205 - DNA, 3021 bp, synthetic construct
  misc_feature 1..3021: note = Synthetic
  source 1..3021: mol_type = other DNA
aattctgtggaatgtgtgtcagttagggtgtggaaagtccccaggctccccagcaggcagaagtatgcaaagcatgcatctcaattagtcagcaaccaggtgtggaaagtccccaggctccccagcaggcagaagtatgcaaagcatgcatctcaattagtcagcaaccatagtcccgcccctaactccgcccatcccgcccctaactccgcccagttccgcccattctccgccccatggctgactaattttttttatttatgcagaggccgaggccgcctctgcctctgagctattccagaagtagtgaggaggcttttttggaggcctaggcttttgcaaaaagctaacttgtttattgcagcttataatggttacaaataaagcaatagcatcacaaatttcacaaataaagcatttttttcactgcattctagttgtggtttgtccaaactcatcaatgtatcttatcatgtctgtataccgtcgacctctagctagagcttggcgtaatcatggtcatagctgtttcctgtgtgaaattgttatccgctcacaattccacacaacatacgagccggaagcataaagtgtaaagcctggggtgcctaatgagtgagctaactcacattaattgcgttgcgctcactgcccgctttccagtcgggaaacctgtcgtgccagctgcattaatgaatcggccaacgcgcggggagaggcggtttgcgtattgggcgctcttccgcttcctcgctcactgactcgctgcgctcggtcgttcggctgcggcgagcggtatcagctcactcaaaggcggtaatacggttatccacagaatcaggggataacgcaggaaagaacatgtgagcaaaaggccagcaaaaggccaggaaccgtaaaaaggccgcgttgctggcgtttttccataggctccgcccccctgacgagcatcacaaaaatcgacgctcaagtcagaggtggcgaaacccgacaggactataaagataccaggcgtttccccctggaagctccctcgtgcgctctcctgttccgaccctgccgcttaccggatacctgtccgcctttctcccttcgggaagcgtggcgctttctcatagctcacgctgtaggtatctcagttcggtgtaggtcgttcgctccaagctgggctgtgtgcacgaaccccccgttcagcccgaccgctgcgccttatccggtaactatcgtcttgagtccaacccggtaagacacgacttatcgccactggcagcagccactggtaacaggattagcagagcgaggtatgtaggcggtgctacagagttcttgaagtggtggcctaactacggctacactagaagaacagtatttggtatctgcgctctgctgaagccagttaccttcggaaaaagagttggtagctcttgatccggcaaacaaaccaccgctggtagcggtttttttgtttgcaagcagcagattacgcgcagaaaaaaaggatctcaagaagatcctttgatcttttctacggggtctgacgctcagtggaacgaaaactcacgttaagggattttggtcatgagattatcaaaaaggatcttcacctagatccttttaaattaaaaatgaagttttaaatcaatctaaagtatatatgagtaaacttggtctgacagttaccaatgcttaatcagtgaggcacctatctcagcgatctgtctatttcgttcatccatagttgcctgactccccgtcgtgtagataactacgatacgggagggcttaccatctggccccagtgctgcaatgataccgcgagacccacgctcaccggctccagatttatcagcaataaaccagccagccggaagggccgagcgcagaagtggtcctgcaactttatccgcctccatccagtctattaattgttgccgggaagctagagtaagtagttcgccagttaatagtttgcgcaacgttgttgccattgctacaggcatcgtggtgtcacgctcgtcgtttggtatggcttcattcagctccggttcccaacgatcaaggcgagttacatgatcccccatgttgtgcaaaaaagcggttagctccttcggtcctccgatcgttgtcagaagtaagttggccgcagtgttatcactcatggttatggcagcactgcataattctcttactgtcatgccatccgtaagatgcttttctgtgactggtgagtactcaaccaagtcattctgagaatagtgtatgcggcgaccgagttgctcttgcccggcgtcaatacgggataataccgcgccacatagcagaactttaaaagtgctcatcattggaaaacgttcttcggggcgaaaactctcaaggatcttaccgctgttgagatccagttcgatgtaacccactcgtgcacccaactgatcttcagcatcttttactttcaccagcgtttctgggtgagcaaaaacaggaaggcaaaatgccgcaaaaaagggaataagggcgacacggaaatgttgaatactcatactcttcctttttcaatattattgaagcatttatcagggttattgtctcatgagcggatacatatttgaatgtatttagaaaaataaacaaataggggttccgcgcacatttccccgaaaagtgccacctgagggcctatttcccatgattccttcatatttgcatatacgatacaaggctgttagagagataattagaattaatttgactgtaaacacaaagatattagtacaaaatacgtgacgtagaaagtaataatttcttgggtagtttgcagttttaaaattatgttttaaaatggactatcatatgcttaccgtaacttgaaagtatttcgatttcttggctttatatatcttgtggaaaggacgtgagtcgtggctttatgccgttaggcgttgctcaatatattctgttgatttggggtggagagttctgtaggtgagtcgtggctttatgccgttaggcgttgctcaatttttt

SEQ ID NO: 206 - DNA, 3021 bp, synthetic construct
  misc_feature 1..3021: note = Synthetic
  source 1..3021: mol_type = other DNA
aattctgtggaatgtgtgtcagttagggtgtggaaagtccccaggctccccagcaggcagaagtatgcaaagcatgcatctcaattagtcagcaaccaggtgtggaaagtccccaggctccccagcaggcagaagtatgcaaagcatgcatctcaattagtcagcaaccatagtcccgcccctaactccgcccatcccgcccctaactccgcccagttccgcccattctccgccccatggctgactaattttttttatttatgcagaggccgaggccgcctctgcctctgagctattccagaagtagtgaggaggcttttttggaggcctaggcttttgcaaaaagctaacttgtttattgcagcttataatggttacaaataaagcaatagcatcacaaatttcacaaataaagcatttttttcactgcattctagttgtggtttgtccaaactcatcaatgtatcttatcatgtctgtataccgtcgacctctagctagagcttggcgtaatcatggtcatagctgtttcctgtgtgaaattgttatccgctcacaattccacacaacatacgagccggaagcataaagtgtaaagcctggggtgcctaatgagtgagctaactcacattaattgcgttgcgctcactgcccgctttccagtcgggaaacctgtcgtgccagctgcattaatgaatcggccaacgcgcggggagaggcggtttgcgtattgggcgctcttccgcttcctcgctcactgactcgctgcgctcggtcgttcggctgcggcgagcggtatcagctcactcaaaggcggtaatacggttatccacagaatcaggggataacgcaggaaagaacatgtgagcaaaaggccagcaaaaggccaggaaccgtaaaaaggccgcgttgctggcgtttttccataggctccgcccccctgacgagcatcacaaaaatcgacgctcaagtcagaggtggcgaaacccgacaggactataaagataccaggcgtttccccctggaagctccctcgtgcgctctcctgttccgaccctgccgcttaccggatacctgtccgcctttctcccttcgggaagcgtggcgctttctcatagctcacgctgtaggtatctcagttcggtgtaggtcgttcgctccaagctgggctgtgtgcacgaaccccccgttcagcccgaccgctgcgccttatccggtaactatcgtcttgagtccaacccggtaagacacgacttatcgccactggcagcagccactggtaacaggattagcagagcgaggtatgtaggcggtgctacagagttcttgaagtggtggcctaactacggctacactagaagaacagtatttggtatctgcgctctgctgaagccagttaccttcggaaaaagagttggtagctcttgatccggcaaacaaaccaccgctggtagcggtttttttgtttgcaagcagcagattacgcgcagaaaaaaaggatctcaagaagatcctttgatcttttctacggggtctgacgctcagtggaacgaaaactcacgttaagggattttggtcatgagattatcaaaaaggatcttcacctagatccttttaaattaaaaatgaagttttaaatcaatctaaagtatatatgagtaaacttggtctgacagttaccaatgcttaatcagtgaggcacctatctcagcgatctgtctatttcgttcatccatagttgcctgactccccgtcgtgtagataactacgatacgggagggcttaccatctggccccagtgctgcaatgataccgcgagacccacgctcaccggctccagatttatcagcaataaaccagccagccggaagggccgagcgcagaagtggtcctgcaactttatccgcctccatccagtctattaattgttgccgggaagctagagtaagtagttcgccagttaatagtttgcgcaacgttgttgccattgctacaggcatcgtggtgtcacgctcgtcgtttggtatggcttcattcagctccggttcccaacgatcaaggcgagttacatgatcccccatgttgtgcaaaaaagcggttagctccttcggtcctccgatcgttgtcagaagtaagttggccgcagtgttatcactcatggttatggcagcactgcataattctcttactgtcatgccatccgtaagatgcttttctgtgactggtgagtactcaaccaagtcattctgagaatagtgtatgcggcgaccgagttgctcttgcccggcgtcaatacgggataataccgcgccacatagcagaactttaaaagtgctcatcattggaaaacgttcttcggggcgaaaactctcaaggatcttaccgctgttgagatccagttcgatgtaacccactcgtgcacccaactgatcttcagcatcttttactttcaccagcgtttctgggtgagcaaaaacaggaaggcaaaatgccgcaaaaaagggaataagggcgacacggaaatgttgaatactcatactcttcctttttcaatattattgaagcatttatcagggttattgtctcatgagcggatacatatttgaatgtatttagaaaaataaacaaataggggttccgcgcacatttccccgaaaagtgccacctgagggcctatttcccatgattccttcatatttgcatatacgatacaaggctgttagagagataattagaattaatttgactgtaaacacaaagatattagtacaaaatacgtgacgtagaaagtaataatttcttgggtagtttgcagttttaaaattatgttttaaaatggactatcatatgcttaccgtaacttgaaagtatttcgatttcttggctttatatatcttgtggaaaggacgtgagtcgtggctttatgccgttaggcgttgctcaatggtcaattttggaataggtgtggtgtggtgctgagtgagtcgtggctttatgccgttaggcgttgctcaatttttt

SEQ ID NO: 207 - protein, 272 aa, unidentified
  REGION 1..272: note = Synthetic
MARSKQDWTQAKFERYLKEGRGQGSGKGYQPWIKIQDFPSKGRVSRPPGWKTNREHHLLSDNEKRLFYVFEWSDTIVDIREQFPLIDLDLAMSIAEEIGINYPKDPESNTARVLTTDFMLSVKQGKKIVQKARTFKLTKDLGSKSVAEKFELEKRYYAAKGIDWGIITEKEVPKQLAENVEWVHTAYKLEENADINLEELRDIANILKSRLQESDANINRITTDLDKNMNIESGTSLYLFRHLIAKKEIIMDMLATKISSCPSSGAIKKIIL

SEQ ID NO: 208 - protein, 745 aa, unidentified
  REGION 1..745: note = Synthetic
MSNDLFVNDLIEWIDESGNSFIERVLWIDEGYIIAFVFNINTKTGFPEPKKVSEIVEAISNGSALKLKSDPWARIVTEEDLSEKEKELRDRAWEIISFIVIQEPSIYYRDYRGALVQQTIEKYNTGRSKGKLVEISVYKYLRRFWQRGKNKNALLPDYVNSGGKGKPKASGEKKRGRPRKYVHDQEIGIGINVTEEDRKIFRFAIAKFYNNSKENFLTTAYDLMIKEYYSEDFYYDENGVKKSILIPPDKRPTFTQFKYWYEVEQSDIRKTIISRKGSIKYALEHRAITGTSQMETIGPGSRYQIDATIADVYLISMYNRNWIIGRPVIYVIIDVFSRMITGVYVGLEGPSWAGAMMALANSATDKVKFCQEYGVEISGDEWPCRHIPDTILGDRGELVGMKVETLIPNLDVRIENAAPYRADWKGLVERQFRTIHGYVKPFVPGYIDTDFRQRGGHDYRLDGRLNIDEFTKIVIFLILQHNNHDYLTKYARDEMMITDDVNPIPRELWQWGIANRSGRLRTFPEDIVKLNLMPAEKATITARGIKFKGMYYTCEKARKEFWFEKSRSSLLSKSEKSLDISYDIRQSKYIYLRSPNGRDFEKCFLLESEQRYLDKNLYDIEYLFAYEELQRQKHQGKRLQEKVDLIANIESIVSKAKEDTEAVLDDNTSNRQKVAGIRENRAFEKDRRRKNEGFELAKEEITNSTEATNNKVNTQSEDLESSKLLKPDHMDLLRRKRQERKRGED

SEQ ID NO: 209 - protein, 555 aa, unidentified
  REGION 1..555: note = Synthetic
VEKIEGELVMIPNGKSAIVARYIDQKLPEYNTNPLIQALPPILSSEEFIDKVTRTPDFDEQERQLEAHYRFHCIERLSRYFDPQNKTVELQKVINVLIMTGYLARNILTPDYANRSRQIYNAIKDGGGKNLQSYVNLPTSASGLTLIGPSGMGKSTNLHNILNLYPQVILHPNYSVYQIVWLKVDCPKTLKGLCTDIFMTIDQLLGTTLFNKFNSSRSSEDYLLAQLAQIAHTHHLGVVVIDEIQNLVTTRRSRDEILNFLVKLDNIIGIPVIRVGTNEAISILQGNFRNARRNTGEGSVIWDRMINDDEWCFFLEGMWEYKWTKTPVFLSDEIKEVFYEESQGIIDIAVKLYKMLQWRAISIGGKEIITTELLRKVAKDGLYLVKPMLDAIRSGDKEWMIKYKDIAPLDTTEYQNKCRSELESKDLQEIRRLARKQQTYQKVSPKLNYVILELLKLEVEPAKAKECAEQVIVSSDEDADITLLTKKAYTLALQGGQVNESLVKANISKAKLKPKYQGNDIRGIVENAKKEKKFAYDDLKLAGIIKNPVEDFINI

SEQ ID NO: 210 - protein, 316 aa, unidentified
  REGION 1..316: note = Synthetic
MLSFFPTLYPDELLYSSLARYHIRSGNKSFKQTDLELFGYSSQQVCKVTLTNNVNYLVKNFPLRSQQTVDNLLQNHTLYPFYATFLMPQEAWLLKDSMSKKLSGSILEIAKVATGSSGESKNFLKFCPGCLEKDTQQYGEPYWHRTHQVPGILVCPTHGVVLWDSCVALESKGIHYYAASVYNCLVITDVKSFTNQALRTLLTLTSDINLLIHSNFTFKGLAWLRTQYQRYLVNKGLLQIFPGGKLKFDEYAFSKLIFDFYGQESLEALNPKLTQHQGKYFSHCLLGCDLNPAVDRITHILMVKFLANSIEAFFQE

SEQ ID NO: 211 - protein, 633 aa, unidentified
  REGION 1..633: note = Synthetic
MLGFFPAPYPDEILYSILARYHIRSGNTSPKITLRELFNSQDVIATVDLPSNLNSLIENLQFISNYQVEDLIYKYTLYPFYSIFLPQKRASQVMDSMKADFGGDIHTRTGIMASSLKMQRYLQFCPKCLEEDLQNYGESYWHRLHQTPGVLVCPLHGVTLQDSTIFMQGFNRHEYYATSLENCPVVPIQQTYSQETLKKLLLLAQDISWLITNNLFSRELEWFQKKYIALLIEKDFATATGRVNQKRLLDNFLFFYGAEVLEAVNSMVNYENEQNWLFSIVRKHRKSFHPIRHLLVIRFLTNSIEEFFNTDYQYKPFGEGSWLCLNAAVDHYLKPVITNLVVTHCLDNKKPLGTFSCSCGMVYCRTGPDETDEDKQRIGKVLTYGQFWEQKLKELVEIQKLGLRETARQLKVDSRTVKRYTAILKLKTFWKSSEKNLLVDSQEVLNLNLNLASDDRIKYRELWKALQQQYPEASKTTLRGLAKGTYIWLYRNDKEWLNKNSPSLKVPLPCVGKVDWAERDKQVLEKVKTAVRTFLSAEKPARVTICRIGKSIGLLALLEKHLAEMPLTKVYLESVTETVEDFQIRRIKWAIKQLDDCGEEIQPWKVIRLAALRENCSQRVQAALENELYKQPN

SEQ ID NO: 212 - protein, 233 aa, unidentified
  REGION 1..233: note = Synthetic
MVVDCSLPTQILSESPLNLTKPTEVLTPHLPYIDLIFNLIGETVPLDHGYELFSAIAHFEPELHKLNTVGINTIAGIPKEGVIQLTKNSRLRIRLPVDQVRLVYPLAGKSLKIGKHTIRLGIPEIYLLEPAERLRSRIVIIQSYQEPESFLAAAQRQLEKLGIQGKAFITKNTDGSPKRRSIKIKRFTVVGFGLEIINLSDEDSLTLLRYGIGGKRKMGCGVFVPVKRKGNAS

SEQ ID NO: 213 - protein, 511 aa, unidentified
  REGION 1..511: note = Synthetic
MSVVASVVNPKIQLNLGDPSITWIHRAGIAGLWMTLKQLEKLYPIPAERPGNLTWFLTHRSISLEWQGQDFVVLDWLLKQSFQINEEGLISLTGLNTHSINIETRINIHLGITGTFLQHNQVFKFDGGKSWSLIVDGIEIDVEYKKAVSYAHQHFAKQLCDKQGQLLGQSIGVAGWLYPGSVVRHVAFTKETRFEEKPQLAFALLYAPVACHYFVLRSHTKPEHTQYALVIPEVVDLEIYAQEYWNLENLDYKDFNVSSLGDAALRYLTYETIIELAIPDQVKRCQVILFGTVVWSKQQKTRIEIAVVEATGIINFIYKLSGISFPEYQIIQYKNKNFIISNLFRGTIADNLVKGFPWWANLYTIFKNKSLFKFITNDGAYKMIQNSEWNLESQKLFIKACHEALKKIYAKIYGRTNEGQYAQIERENIRILSQLGRCTNAENFRKFIAEFWGRAGQLSILEKHWEELLPLTSGIMDWKVARDLTFIALASYPKSNMVEKQILEIPDSNSE

SEQ ID NO: 214 - protein, 324 aa, unidentified
  REGION 1..324: note = Synthetic
MFHLFGNILTSYGTAANNRGENEGNITPLQKLNWKGEVHTLVSSEAIRWALRYYWQNVGYPVNRRWDENAQPVADHVWQDPNFDDIRFIDDDVLGFMQAEAAKAEASDESEGEAEEASQNENKKISKGKDKQTSPRKGKQKPKGKITARRGVLEVTRAVSMIPFTGDITFNAVSGVKGRNSLYATEIHATRYQYGFALTPDSLKDKSRIHAVLDGLISIGEVAGNHARFLYDFSPESIVLRWTDDFSPRFLYCFEQDELGNLSVSNLVRQVEVGDIDPKELWIGGLISQGLEDLGANVFPGVKSAVKALKQVIAEDLQLSSGSD

SEQ ID NO: 215 - protein, 208 aa, unidentified
  REGION 1..208: note = Synthetic
MMTIALKVEVPIACFRQSRAREYAETYPVPPPSTVYGMLLSLIGETDRYKHCGTQLAIALLSKPEKSIVIRTFRRFKTKDIHHPKNAKPDYQELLTNIEFVVWVKTDKAKPTLPELLQQAFANPASINRFGGLCLGESRDLVNTVTLLPENYHGESLWWLVTDEDGSLTLPYWVDHVGSKRTRWQCYELQESQVWQPPDLSWTTIQTS

SEQ ID NO: 216 - DNA, 117 bp, unidentified
  misc_feature 1..117: note = Synthetic
  source 1..117: mol_type = other DNA
gtcgagtaaaaaaatacaaataattcagtaatatgtataacaataataaagtcgtataacaaataaaaaagttatacaatacataaaaaagttatacactttatcctgtaggcgcgt

SEQ ID NO: 217 - DNA, 387 bp, unidentified
  misc_feature 1..387: note = Synthetic
  source 1..387: mol_type = other DNA
gctttgtacttggaatgcgatcgccactaaatcttggaacaaatattcccaaatccttacacggaagtaggttgcaaaactatacaacttttttatttgtttttagatagtagcataataaaattgtataactttattttttcaaaaattctcagtgcctaacgatagaatagtgtttgtagccgcgcaaattgtacaacttttttagttgtttacataatattgtggaggaataaaaaagttgtactatttttcctatgggtgtatctaccaagcatccataggagaaccttttgttgatgagactaataaaattatatgcggcgtgattctattttttatttattttaaaaataaccgaagctagtgtttaagttactgaaaaat

SEQ ID NO: 218 - DNA, 309 bp, unidentified
  misc_feature 1..309: note = Synthetic
  source 1..309: mol_type = other DNA
gatgtcgtcagacgttgagcagtcgaatacttcgatggagcggaggagctatcagcgcttctttaacattggatgtcggcagacgttgagcagagattgcgttcaccatcaaagaacaagccaattggagttctttaacattagatgtcgtcagacgttgagcaggttggtgttccagcgattgactataccgagatgcaagttctttaacattagatgtcgtcagacgttgagcagactcaagctcaagcaagtaggttatgggcgatagtagttgtttaacattggatgtcgtcagacgttaagcaa

SEQ ID NO: 219 - protein, 272 aa, Anabaena sp.
MARSKQDWTQAKFERYCKEGRGQGSGKNYQPWIKIQDFPSKGRVSRPPGWKTNREHHLFSDNEKRLFYVFEWSDAIVDIREQFPLLDLDLAINIADEMGINYPKDPQSNTPYVLATDFMLSVQQGKNIVQKARTFKLTKDLGSKSVAEKFELEKRYFAAKGIDWGIITEKEVPKQLAENVEWIHTAYKLEENADINLEELRNIANILKFRLQESDASINKITTVLDKEMNIESGTSLYLFRHLIARKEIIMDMLVNKISSCPSSKEIQKIIF

SEQ ID NO: 220 - protein, 743 aa, Anabaena sp.
MINDLFVNDLIEWIDESGNNFIERVLWIDEGYIIAFVYDINAKTGFPEAKKVSEIREAISDGRALKLKSDPWARIVRDEDLSEKEKELRDRAWQIISFIVTQEPSIYYRDYRGTLVQQVIEKYNAGRTEGELVPITVYKYLRRFWQRGKNKNALLPDYANSGGKGKPKSSGDKKRGRPRKYAQVPEIGVGRNVTEEDKRIFRFATAKFYNNSKENFLTTAYDLMIKEYYAEDFYYDDNGVKKSILIPPDKRPTFTQFKYWYEVEQTDIRKTMISRKGSRKYALENRAITGTSQMETIGPGSRYQIDATIADVYLVSLYNRNWIIGRPVIYVVIDVFSRMITGVYIGLEGPSWTGAMMALANAATEKVKFCREYGIEISEDEWPCKHIPDTILGDRGELAGMTVETLIPNLNVRIENTAPYRADWKGLVERQFRIIHGYVKPFVPGYIDTDFRQRGGHDYRLDGRLNIDEFTKIVIFLILQHNNHDYLIDYARDEMMITDDVNPIPRELWQWGIANRSGRLRTFPEDIVKLNLMPTEKATITARGIKFKGMYYTCEKARKEFWFEKSRSSLLSKSEKSLNISYDIRQPNFIYLRSPNGREFEKGWLLESQQRYLDKNFYDIDYLLAYEKLQNQKHQGTRLQAKADLIANIESIVSQAKEETEAVLDDTISNRQKVSGIRQNRADEKNARRKNEAFELAKAETPNTDNTKNLINTQSEDSEDSKLLQPDHMDLLKRKRQERKRGK

SEQ ID NO: 221 - protein, 557 aa, Anabaena sp.
VESNEEEVVSIPNGKSAVIARYIDQKLPEYNANPLIQALPPILSAEEFIDKVTRTPDFDEQERELEAHYRFHCIERLSRYFDPQNKTVELQKVICALIMTGYLARNILKPEYASRSRQIYNAIKDGGGKNLENYVNLPTSASGLTLIGPSGMGKSTNFQNILNLYTQVILHPEYSVYQIVWLKVDCPHAGSLKGLCTDIFLAVDRLLGTNYFKKFGSSRNSEDYMLAQVAQIAHTHHLGVLVIDEMQNLVTARRRSSDMLNFLVKMDNTVGIPVIRVGTNEAFPILQGNFRNARRGTGEGSVIWDRMVNDDEWYFFMEGMWEYQWTKTPVPFSDEINEVFYDESQGIIDIAVKLYKMVQWRAISIGGKEIITIELIRQAAKDGLYLVKPMLDAIRSGDKEWMIKYKDIAPLDTTEYQNKCLSELDSKDLKEIRRLARKQQNQQKVSPKLNYVILELLNLEVEPAKAKECAEQVIVSSDEDAEIPSLVKKAYALALQGGQVNESLTKTNTKKAKLKPNYQENDIRRIVENANKEKKSAYEDLKLAGIIKNPVEDFINI

SEQ ID NO: 222 - protein, 315 aa, Anabaena sp.
MLSFFPTLYPDELLYSTLARYHIRSGNKSFKQTDLELFGYSSQQVCKITLTNNLNYLVKNLPLRSQQKVENLLQNHTLYPFYATFLMPQEAWLLKNSISKKLSGSILDVAKVATNSIGDSKKFLKFCPECLEKDTQKYGEPYWHRIHQVPGILVCPTHGIVLQDSCVKVESKGVHYHAASVDNCLVACKVKNLTNNTVKTLFTLVNDINWLIHSNFAFQGLAWLRAQYQRYLVDKGLLQTFPGGKFKFDEYGFAQLIFEFYGQESLEAINPKLTQHQGKYFSHCLFGCDLSPAIDRITHILLIKFLANSIEEFFQ

SEQ ID NO: 223 - protein, 636 aa, Anabaena sp.
MVSFFPKPYPDEILYSVIARYHIRSGNTSPKITLQELFNSQTTVATVDLPSNLNNLIQNLQFISNYQVEDLIYKHTLYPLYSPFLPANRSSQVLESMKGDYGGDIHTRAGIMASSITMPKYFRFCPTCWEEDLKNYGEPYWHRIHQIPGVLVCPFHDEVLQDSLAPLHGFNKHEYYAASTDKCSITKEPSIFSPDTLKKLLVLAKDFWWLLNSEIPCQEPQWFRKQYTNLMIEQGLATATGRIYQKKLLDNFLFFYGREMLSAVNSIVTHNDSSNWVTSIVRKHRKSFHPLRHLLMMRFLKTSVEEFFKQDNKYKPFGEPPWLCLNAAAEHYLQPVITNLVITLCCDTKKPVGTFSCTCGMVYCRTGPDETDDDKLRIGKVKAFGQLWEQKLKEFVEVEKLGLRETARRLNVDPGTIKRYVSLLKLTTYWQTRKENGSVDLQEVAEIHPNSATELKLKHRQDWMALQAQNPDASKTTLRKLAPATYIWLYRNDREWLNQNSPALQVAVPSVVRVDWQERDRQILAQAQDAVRSLINADTPERISISRVGKTIGLLALLEKHLDQMPLTKAYLESVVETVEDFQMRRIKWAIKLLDECGEEIMRWKVVRVAALREDCSERVNAFLENELDKAYKKER

SEQ ID NO: 224 - protein, 227 aa, Anabaena sp.
MIVDGNLLRQIPSESPPKPRELLMSQLPYMDLTFNLIGETLPFDHGYELFSAIAHFEPKLHTLDTLGIHTIAGIPKDGVINLTQNSRLRVRIPVNQVHLVYPLAGKSLRIGKHTIRLGIPDICLLQPAEQLRSRIVVIRGHEEPETFLVVAQRQLEQLGIQATASIPTKANGKPIRKTIKIKRFTVVGFGLEVTNLSNEDSLTLQIHGVGGKQKMGCGLFMPIQERQ

SEQ ID NO: 225 - protein, 498 aa, Anabaena sp.
MKTAANPKIQLNLGDPSMTLLHRAGVAGLWMTLKKLEKIYPTAAQRIGNFTWLLTPSNISLYWEGQDFTVLDWLLKHSFQISDEGLISLTGLDSQNMDIQTQIIIHQGITATFIQHNKFFKSAGQQSKQLIIDGIQLRVDYKKAASYAHQHFAKHLCDQYGQLLQEPIGIRGWLYPGAVVRHYAFKEQTAFEEKAEYALALLFAPVACQYFVLRSHTEPSHTNYVLVVPEVIDLELYAQYLWYLSKLDYKHFHVSSLGDAGLKFITYEAKQLDNFNFIKRCQVISFSTKAWSERQKTRAEIAIIELNSSVSYLYKLSCICFPNCQVVIYKNQHFLLPSLMKGIIANNLAMGWPWWANWISVIKNNKSFKQFTDEYIGINKMIQDSEWDIEAQKLFIQACHEALRKIYAKIYSRMKEGGYAQIERENTRILSQLKRCTNADNFRKFIAEFWGRAGQMTILEEHWVELLPLTTGIGNWKVARDLTFIAMASYPKNKITEV

SEQ ID NO: 226 - protein, 324 aa, Anabaena sp.
MFHLFGNILTTYGTAANNRGENEGNTTTLQKLIWKGEVHSTVSSEAIRWALRYHWQNAGYPVNRRWDENAQPVADHIWEDPNFDDIRFIDDDVLGFMQAEAAKVEAADESEVEIQNSTQDENQTTSQGEEKKTSQRKRKQRPKGRISARRGVLEVTRAVSTIPYAGDITFNSMSGKKGRTSLYATEVHATRYQYGFALTPNRLKDKSRIHAVLDGLISIGDVAGNHARFFYDFSPDSIILRWTHDFSPRLLYCFEEDELRNISTPDLVRRVEAGDIDPKELWIGGAIASTLENLGANLFPGVKATVEALKQVIIEDLQLSLRSS

SEQ ID NO: 227 - protein, 210 aa, Anabaena sp.
MTTIVVKVEVPIACFRQSHAREYAETYPVPPPSTVYGMLLSLVGEVDRYKHCGVKLAIALLSKPEKSTVIRTCHRFKTKNIHESKNNKPDYQDLLTNIEFVVWVDAGADKAKPNLAQRLEEAFTNPASINRFGGLCLGESRDLVNDVSLLPENYYAESMRWLIRDDYGLLTLPYWVDHVGSRGTRWLCYEIQEFQVFQPPELSWTSIQSD

SEQ ID NO: 228 - DNA, 130 bp, Anabaena sp.
  source 1..130: mol_type = other DNA
tcggtaactgtggagtaaaataatactttaaataagtataattgtacaacaataaaaaagtcgtataacaaataaaaaagttgtacaatatataaaaaagttgtacaatatatcctgtgggtgcatatgc

SEQ ID NO: 229 - DNA, 490 bp, Anabaena sp.
  source 1..490: mol_type = other DNA
tgacattctcaaaactaaattagttattaacccaagttgctagttatgccgaagagcgatcgcagtgggttccattgccgcttcagaatggatagttaacatatactctcaaggcgactgtatttactgcttccctgcgtggcgtagccattcctgttacttaatgtttccggttttagtcgatactattaccatagcagcaatagagggattactgattaagcttgctctggagagcgatcgcaagttattttggaacaaatagatgccaaatccttacagggcttgctttcggcaaattatatgacttttttatttatcaatatgaggcatttctgaaaaattgtacaactttattttttgatatcaaataaaattgaacgtaaatacaaggcttataaactttcaaattatataagttttttatgtttttacaataatttggtagaataaccagataatttctgaatgtgatgataatattatcaca

SEQ ID NO: 230 - DNA, 322 bp, Anabaena sp.
  source 1..322: mol_type = other DNA
gtgctttaacattagatgtcgttaggcgttgagcagtgattaacctgaaggcttgctccgggatgttgtaggtgctttaacattagatgtcgttaggcgttgagcagcaccggtaccgcgagtagtcgcaccaatattcatatgtgctttaacattagatgtcgttaggcgttgagcagttgaatgcgaagttatcggcagatgttttgttgttgtgctttaacattagatgtcgttagacgttgagcagtgaccattggtgtatccatcaatcctgactgctgcgtgctttaacattagatgtcgttaggcgttatctact

SEQ ID NO: 231 - protein, 272 aa, Nostoc sp.
MVRGRREWTQAKYERYIKEGRGRGSGKDYKPWLTIQDFPSKGRSSRTPGWKTNRVHHFFSDHEKRLFYLFEWSDIVTDIREQFPLDNLDLAMSIATDIGIKYPIDTQSGTPHVLTSDFMLTVNHNGKRTQIARTVKQSTELEKKRVNEKLEVERRYYLAIGIDWGIITEKEISRLLAENVEWIHSAYRLEANSEMDTVQLRELSKILKSKLQEEDATINKITIALDEEMNINYGTSLYVFKHLIARKELIVDLVKIKLSACPSAKVIEKIIF

SEQ ID NO: 232 - protein, 742 aa, Nostoc sp.
MAQDLFVNDLIEWMLDSKTHVIERIVWIDEGYIIAFVIDINAKKGLPEAKKISDICDAISEGIAFKQQRDPWARIIRDENLTDREKEYRDKAWEIISSLVTEEPLIYYRNFRGSLVKQVVEKYNLEKNKDKLVEKTVYGYLRRFWQRGKNINALIPDFINSSGKGKIRGQSSKKRGRPKKYAHDPDIGEGVNVTEEDRMIFRIAISKFYNNPKQNYLTTAYDLMVKNYYKEGIRYDENGVQKSILTPTDKIPTITQFKYWYQLEQDDVTKTLTSRKGAKRVALENRAILGTSKMETIGPGSRYQIDATVADVYLVSKYNRNWIIGRPVIYVIIDVFSRIIAGVYVGLEGPSWTGAMMALANVATDKTLFCKEYNINITEDEWPCNQMPDAILGDRGELAGMTVETLIPNLYVRIENAASYRADWKGLVERHFRIIHEYVKPFLPGYVDTDFRQRGARDYRLDGKLDIDQFTEIIVHLIVHHNNKPLKEYERDEAMIADDIPPIPTELWKWGITNRSGRLRTFSEDIVKLNLMPTEKAIITAKGIKMRGKEMYYTCDSAEKGQWFEKARSNLLSKSDKSLIVSYDIRNLNFIYLPSSDGRDFEKCFIIDSEGRYANKNFYDIEYLLAYEELQRQKNQGKQLQEKVDLIAEIESIVDRAEKMTNAAQEPNLSKTKKLSGIRENRAFEKAKRRENERFELANTENKNSFQAVESNLETSEQPESLQPNHLDILRKNRQERKLGQE

SEQ ID NO: 233 - protein, 555 aa, Nostoc sp.
MDRNEGELIRIPNGKLAVVARYIDQKLPEYNANPLIQALPPILSAKEFLNKVTITPEFHEQERELEAHYRFHCIERLSRYFDPQNKTVELQKVICTLIMKGYLARNLLKPEYASRSRQIYHAMEDGGGKNLEKYVNLPTSASGLTLIGPSGMGKSTNFQNILNLYDQVIFHPDYSVYQIVWLKVDCPKTLKGLCTDIFTEIDKLLGSKLFNKFSSSRSSEDYLLAQLAQIAHTHHLGVLVIDEIQNLVTTKRSRDEILNFLVKLDNIIGIPVIRIGTNEAISILQSNFRNARRSTGEGSVIWDRMLNNDEWCFFMEGMWEYQWTKTPVPFSEQLKEIFYYESQGIIDIAVKLYKMVQWRAISIGGGEVITIDLIRQAAKDGLYFVKPMLDAIRSGDKEWMIKYKDIAPLDTTEYQNKCLSGLDYNDLKEIQRLARKQQNQQKVSPKLNWIIARLLELEVEASRAKECAEQVIVINDENADIATLVNKAYALALQGGQVNTNLVKTSQKKAKLKTKYIENDILCAVENAQKEKKSAYEGLKLAGIIKNPVEDFINI

SEQ ID NO: 234 - protein, 315 aa, Nostoc sp.
MLSFFPALYPDELLYSTLARYHIRSGNKSFKQTDLELFGYSSQQVCKITLTNNLNYLVINLPLGSQQTVDNLLQNHTLYPFYATFLMPQEAWLLKNSMSKKLSGSILDIVKVATNFSGDSKKFLKFCPECLEKDTQKYGEPYWHRIHQVPGILVCPTHSVVLHDSSVGVESKGIYYHAASMDNCLLPSKVKIFTNKTLQTLFILANEINWLIHSNFTFRGLAWLRAQYQYYLVHKGLLQTFPGGKFKFDEFGFTQLIFEFYGQEFLEALNPKLTQHQGKYFSYCLFGCDLNPAIDRITHILMIKVLANSIEVFFQ

SEQ ID NO: 235 - protein, 635 aa, Nostoc sp.
MLGFFPAPYPDEILYSILARYHIRSGNTSPKITLRELFNSQDVIATVDLPSNLNSLIENLKFISNYQVEDLIYKYTLYPFYSVFLPPKRATQVMESMKADFGGDIHSRAGIMASSLKMQRYLRFCPKCLEEDLQKYGESYWHRLHQTPGVLVCPVHCVTLQDSTIPIQGFNRHEYHAASQENCPVVSVQQIYSQQSLKKLRVLAQDILWLINSNLLSRELEWFQRKYIALLIEKGFATATRRVNQKRLLDNFLFFYGAEILEAVNSMVNYKNEQNWLFSIFRKHRKSFHPIRHLLVIRFLTNSIEEFFNTDYQYKPFGEGPWLCFNAAVDHYLKPVITNLVVTHCLDNKKPLGTFSCFCGMVYCRTGPDETDEDNLRIGKVNTYGQFWEQKLKELVEIQKLGLRETARQLKVDPRTVKRYTAILKLKTFWKSSQKNQLVNSQEILDSNLNLANDNKIKYREVWKTLQQKYPEASKTTLRRLAQGTYAWLYRNDKEWLNKNSPVLKVPLACVGKVDWAERDKQVLKKVKNAVRALLSAEKQKPTRISIGRIGRTIGLAALLEKHLAEMPLTRDYLESVKESVEDFQIRRIKWAIQRLDDCGEEIQPWKVIKLAALRENCSERVQAVLESELYKQPD

SEQ ID NO: 236 - protein, 233 aa, Nostoc sp.
MIVDCSLPTQITSESPLKLTESRELLTSQLLYIDLIFNLIGQTVPLDHGYELFSAIAHFEPKLHKLDTVGIHTIAGIPKEGVIQLTKNSRLRIRLPVEQVGLVYPLAGKQLRIGKHTIRLGIPEIYLLEPAERLRSRIVIIQGYQEPESFLAAAQRQLEQLGIQAKAFITKNTDGSPKRRSIKIKRFTVVGFGLEIINLSNEDSLTLLRHGIGGKRKMGCGVFLPVKRKENAT

SEQ ID NO: 237 - protein, 510 aa, Nostoc sp.
MSVLASVVNPKIQLNLGDPSITWIHRAGIAGLWMTLKQLEKLYPIAAERPGNLTWLLAPRSISLEWQGQDFIVLDWLLKQSFQINEDGLISLTGLNRHSINIETQINIHLGITATFLQHNQVFKFDGEKSWPLIVDGMEIDVEYKKVVSYAHQHFAKQLCDKQGQLLEQPIGVAGWLYPGSVVRHVAFTKETKFEEKPELAFALLYAPVSCHYFVLRSPTQLQHPQYVLVIPEVTNLEVYAQQYWSLGNLDYKYSHVSSLGDAALRFLTYKTVAIPNQVKRCQVILFGTVAWSKQQKTRTEIAVVKVTEIIDIVYKLSCISFSEYKIINYKNKNFIISNMLKGIIADNLIKGFLWWNDLYIKIINFNLSKLILYENRGIYNMIEHSKWDIEAQKLFIRACHEALKKIYAKIYDRTKEGQYAQIERENIRILSQLGRCTNVENFRKFIAEFWGRAGQLSILEEHWEELLPLTSGIMDWKVARDLTFIAIASYPKSKQINTKNLEKAQLGNE

SEQ ID NO: 238 - protein, 324 aa, Nostoc sp.
MFHLFGNILTNYGTAANNRGENQGNITTLQKLIWKGEVHTTISSEAIRWALRYYWQNVGYPVNRRWDENTQPIADHLWQDLNFDAIRFIDDDVLGFMQAEGAKVEASDEPEGGTEEPSQDENKKSSKGKNKQTSQSKGKQKPKGKITARRGVLEVTRAVSIIPFTGDITFNAVSGVKGRNSLYATEIHATRYQYGFALTPDSLKDKSRIYPVLDGLISIGEVAGNHARFLYDFSPESIVLRWTHDFSPRFLYCFEQDDLGNLSVSNLVRQIEVGDIDPKELWIGGLISQGLEDLGANVFPGVKSAVKALKQVIAEDLQLSSGSN

SEQ ID NO: 239 - protein, 208 aa, Nostoc sp.
VTTIALKVEVPIACFRQSRAREYAETYPVPPPSTVYGMLLSLIGETDRYKHCGTQLAIALLSKPEKSIVIRTFHRFKTKDIHDPKNAKPDYQELLTNIEFVVWVKTDKAKPTLAERLQQAFTNPTSINRFGGLCLGESRDLVNSVTLLPENYHAELLWWLVTDEDGWLTLPYWVDHVGSRRTRWQCYELQESQVWQPPDLSWTTIQTS

SEQ ID NO: 240 - DNA, 149 bp, Nostoc sp.
  source 1..149: mol_type = other DNA
atttatactactaaagcagtaattgttgtggaggaataattcggttgaacaataaataattcgattcaacaatttataaaacgattgaacaatagcctctaagggagtatgattgtaccaagtaaaggtgcgatcgcttctagaggtta

SEQ ID NO: 241 - DNA, 327 bp, Nostoc sp.
  source 1..327: mol_type = other DNA
gttctttaacattagatgtcgtaagacgttgagcaggaaatcaacggcgctgatggggttgtcttgatgcagttgagttctttaacattagatgtcgtaagacgttgagcagactcttgtgtgtccgtcgcattctgttggagagttgttctttaacattagatgtcgtaagacgttgagcaggttggagtgccgacaattgactttaatcaaatgcagttctttaacattagatgtcgtaagacgttgagcaggtaagaaattcccgctgttgcttcgctattggctagggttctttaacattagacttgttgggaaataatatga

SEQ ID NO: 242 - protein, 272 aa, unidentified
  REGION 1..272: note = Synthetic
MVRGRGEWTQAKFERYRKEGRGRGSGKDYKPWITIQDFPSKGRSSRTPGWKSNRVHHFLSDQEKRLFYLFEWSDVVTDTREQFPLDDLDLAMSIATEMGIKYPVDLQSGTPYVLTTDFMLTVNQNGKQVQIARTVKQSTELEKKRVIEKLELERRYYLAKSIDWGIVTENEIPRLLAENVEWVHSAYKLEANSEMDIAQLHELGTILKSKLQEHDTAINRVTTALDKEMNIKSGTSLYMFKHLIAAKKIIIEMLETKISAYPSSKVIEKIIF

SEQ ID NO: 243 - protein, 743 aa, unidentified
  REGION 1..743: note = Synthetic
MHENLFINDLIEWESDGNSQLIERIIWIDEGYIIAFVLDINSKKGLPEPKKVSEILEAMSEGLAFKQKKDPWSRIIREENLTDRDKEYRDKAWEIISSLVVQEPSIYYRNIRGSLVRQVIKSYNEGREKDKLVERTVYGYMRRFWQRGKTKNALIPDFINSSGKGKIRGDSNKKRGRPKKYSYDPEIGEGVNVTEEDRRIFRIAISRFYNNPKENYFTTAYELMVKEFYKEGIRYDENGVRKSILTPTEKIPTITQFKYWYQIEQYDVTKTLTSRIGAKRFALENRAILGTSKMETIGPGSRYQIDATVGDVYLVSKYNRNWIIGRPVIYVIIDVFSRMITGFYVGLEGPSWIGAMMALTNVAADKVMLCQEYNIDIAEEQWSCNQMPDAILGDRGELAGMAVEPLIPNLYVRIENAASYRADWKGLVERHFRIIHEYVKPFLPGYVDTDFRQRGARDYRLDSKLDIDQFAEIIIRLIIFHNNKPLNEYERDEAMIADDVPPIPRELWKWGIANRSGRLRSFPEDIVKLNLMPTEKATITAKGIKLRGKDMYYSCDQAQKEQWFEKARSNMLSKSEKSLIVSYDIRNPNFIYLPLEDGRNFKKCYLIDPEGRYINKNFYDIEYMLAYEELQQQKTQGKTLQEKVDLIADIEHIVSKAENMTEAAQDEPLSKSKKVAGIRENRAFEKAKRRENEGFELAKTETPTSTEAVETNNESLKLPKSLQPNHLDILKQKRLERKRGRKE

SEQ ID NO: 244 - protein, 555 aa, unidentified
  REGION 1..555: note = Synthetic
VDGKNEREWVEIPNGDWAAIAKYSDHKLPEYNINPLVQALPPILSRDEFLERVTEVPDYDSVETELEPQYRFHCIERLSRYFDPQNKTIELQKVIAVLIMQGYIARNILKPEYTRRSRQIYDAIKDGGGKTLENYVYVPTSASGLTLIGPSGMGKSTNLLNILSLYPQVILHPEYTTFQIVWLKVDCPRSLKGLCTDIFLAVDRLLGTSYFKKFGSRGNSEDYMLAQVAQIAHTHHLGVLVIDEMQNLVNARRNRDDLLNFLVKMDNTIGVPVIRVGTNEAFPILQGNFRNARRGTGQGSVIWERMLQNDDWDFFLTGIWEYQWTKTPVDFSDEINEAFYYECQGIIDIAIKLYKMIQWRAISLGGDEKITVDLIHQSAKDGLYLVKPMLDAIRSGDQDWMIKYKDIAPIDAIEYKNKCLSELESRDLEEVRRLARKQQSRGNQSVKLRHIIIELVKLDVEPSVAKECAEKVLAINEDNADIPSLVKEAYIYALQGEPVKKGTAKTNIRKTKPKYQSNDIRQIVENAKNKKIPAYQDLKAADIIKNPLQDFINIE

SEQ ID NO: 245 - protein, 315 aa, unidentified
  REGION 1..315: note = Synthetic
MLSFFPQLYPDELLYSGLARYHIRSGNTSFRQTEIELFGYYSQQICRVILPSNLNYLVNNLPLRSKQTVENIIQNHSLYPFYATFLIPQEAWVVRESMKKKLNGSILEMAKVAFNSTDRAKKFLKFCPICMEEDTQKFGEGYWHRFHQIPGVMVCSVHNSALYDSSVIVETRNTHYHAASPDNCILNTNTRKYTEETLRNLIVLAREVEWLISNNMDFKGLAWLRSQYKHYLVNKKLITLFPGSKFIFKEKDFSKSIFQFYGKDFFETINQNCIKNPDKYFSNCLLACDINPVIDRIIHILIINFLANSLENFFR

SEQ ID NO: 246 - protein, 246 aa, unidentified
  REGION 1..246: note = Synthetic
VCLVQQDMVKEMSSYFSLPTQTPITETLTQTYPKETLTPKLPWVELRFSIIGQTIPVDHGYGLYSAIAHFQSQVHDMDNTLGIHTIAGIPSEDGQIHLTDNSRLQIRLPVDKISLIYPLAGKSLKIGKHTIRLGIPEIYLLEPAERLRSRIVIIQGYQEPELFLAAAQRQLEKLGIQRKAFITKNTDGSPKRRSIKIKHFTVVGFGLEIINLSDEDSLTLLRYGIGGKRKMGCGVFVPVKRKGNAS

SEQ ID NO: 247 - protein, 511 aa, unidentified
  REGION 1..511: note = Synthetic
MSVVASVVNPKIQLNLSDPSITWIHRAGIAGLWMTLKQLEKLYPIPAERPGNLTWLLTPRSISLEWQGQDFVVLDWLLKQSFQINEEGLISLTGLNTHSINIETQIYIHLGITGTFLQHNQVFKFDRGKSWSLIVDGIEIDVEYKKAVSYAHQHFAKQLCDKQGQLFGESIGVAGWLYPGSVVRHVAFTKKTKFEEKPQLAFALLYAPVACHYFVLRSHTKPEHTQYALVIPEVVDLEIYAQEYWNLGNLDYKDFNVSSLGDAALRYLTYETIIELATPDQVKRCQVILFGTVVWSKQQKTRIEIAVVEATEIIDFIYKLSRISFPEHQIVKYKNKNFIICNLFRGTIANNLVKDFPWWANLYKIFKHESLLKLITNDGVYKMIQNSEWNLESQKLFIKACHEALKKIYAKIYGRANEGQYAQIERENTRILSQLGRCTNAENFRKFIAEFWGRAGQLSILEKHWEELLPLTSGIMDWKVARDLTFIALASYPKSNMVEKQILEISDSNSE

SEQ ID NO: 248 - protein, 324 aa, unidentified
  REGION 1..324: note = Synthetic
MFHLFGNILTSYGTAANNRGENEGNITPLQKLNWKGEVHTTISSEAIRWALRYYWQNVGYPVNRHWYENAQPVAAHVLQDPNFDDIRFIDDDILGFMQAEAAKVEASDESGGAAEEASQDDNKKSSKGKDKQTSPRKGKQKPKGKITARRGVLEVTRAVSMIPFTGDITFNAVSGVKGRNSLYATEIHATRYQYGFALTPDSLKDKSRIHPVLDGLISIGEVAGNHARFLYDFSPESIVLRWTHDFSPRFLYCFEQDELGNMSVSNLVRQVEVGDIDPKELWIGGLISQGLEDLGANVFPGVKSAVKALKQVIAEDLQLSSGSD

SEQ ID NO: 249 - protein, 208 aa, unidentified
  REGION 1..208: note = Synthetic
VTTIALKVEVPIACFRQSRAREYAETYPVPPPSTVYGMLLSLIGETDRYKHCGTQLAIALLSKPEKSIVIRTFRRFKTKDIHDPKNTKPDYQELLTNVEFVVWVKTDKAKPTLPELLQQAFANPASINRFGGLCLGESRDLVNTVTLLPEKYHGESLWWLVTDEDGSLTLPYWVDHVGSKRTRWQCYELQESQVWQPPDLSWTTIQTS

SEQ ID NO: 250 - protein, 269 aa, Nostoc sp.
MSKGWTLSTIDRRLNNQRGLGVGKQYKPWLTVRDQSSSGRSAREPGWKTGRVHHFHSDLERYAFYMYEFWDQVLDIREQFPMFDVELAMTIAKEQGMQNFRDPKTKVPYIYTTDFMLTMNLHGQEVNVARAVKSHQQLNKRSVRNRLLLEQRYWAAKGIEWQLVTEQVISKVFAKNVEWVHNAYWLEPTRDLNISELLELAKVLKLMLRDNDSTVTKITTRLDKENDIERGTSLYLFKYLVAKKEVIMDMFETQIFKSPSTRLIKKIVF

SEQ ID NO: 251 - protein, 217 aa, Nostoc sp.
MEENLYVNDLIEWELDSGNKVLERILWIDEDYTIAFLIDVNTNKGLPKLKKVSEIVEEISNRLAFKQRVDPWARVIREEDLRDTEKVIRDKAWNIISELVLEEPLIYERKARGSLVQDAIGKYNAREDNNKLIPKTVYGYLRKFWQRGKTKNSLIPDYINCGGRGKTKAYSEVKRGKPRTYKHINEIGEGINITEEDKRCILIGIDRYYKKKKKNIS

SEQ ID NO: 252 - protein, 516 aa, Nostoc sp.
MKFNLIPRSQQPTYTQFKYWYNIEFEQDVKTSIISRKGSKAYALKHRPILGTSKSETPGPGSRYQIDATVVDVFLRSVYNINWIIGRPIIYVVIDVFSQMIVGVYVGLEGPSWIGAMMALTNVVTDKVKFCKEYGIEISEDQWPCKELGDCILGDRGELIGMPPEDTLSPNLYIRIENAASKRGDWKGLVESRFHILHHETKPFIPGFVDQELKQMTGIDYRLRSRLNIDSFTGIVINLIISHNNRRHNRYQRDTDMIADDVLPIPTELWKWGIVNRSGRLKSYDEDVVKLNLLPIIKATITSQGIKLNGKLNNLFKLKGNYLYYTCEKAEKEQWFTKARSGLLTQEEKSIAVSYDIRKPNFIYLPSRDGRSFEKCSLIDPEEIYSNKSFYDIDYKLTKEDVEKQETQGEELQKEIDVTVDIENIVNTAEDNFKLDQDNTITKTQQIAKIGENRKNEKNQRREDEGFELQRTQSESISDSKDEVQTKDTSSNKLLVPDYSNILEQNREGRKRGRSN

SEQ ID NO: 253 - protein, 581 aa, Nostoc sp.
VDEAINFKIYHEWDWKALPNGGLIAIARYRQHKHTEYNLNPLIQTLPEIISNQEFLNKVTLEPDLSDEEIIGEAHDRFHCVERLSDFYFEPLGKTVSLYRLVSTLIMRGYLHRNPLVSEYAKRSREINEAVQDGNGTNILKYISLRISASALTLIGPSGMGKSTDIKRILSLYPQVIVHPNYKIYQVVWVKVDCSSIGSLKGLCSDIFFALSRILKDEKYQKYAVPRNSVDYMLAELAQVANTINLGVLVIDEMQNLANTKTNENDILNYLVDLSNTIGVPIIRIGTPEAKPILMGNFRNARRGGECIEWHRLTRATNKQDDSWKKTDFYYLITGLWVYQWTKTSVKFEKEFYDTFYNCSQGIIDITIKLYKMVQWKAIAIGGEEEISVELINKVAAEGLILVQPMLDAIRSGKQEDIEKYKDIALPDEYVTNYREKCISELIGRQQQEIRDSVRRQQGRKSILPKVRAITTELLKTEKLGLDFDKAIEYAEKVVNSSKEDNDILTLIKKAQILALDGDSVKTSKSQESIQSKSSSKPATNKKRQAAKKTNKKQNLSGNSQSDEGLETLNQFISDDITKIQ

SEQ ID NO: 254 - protein, 318 aa, Nostoc sp.
MLNGFPRIYPDELLYSVIARYHIRNAYKSFHQSDMELFGYASQQIYRVVLPCNLNHLVREIHLHLFYELNINDLIYHHTLYPFYASFLPPQEAWLLKNYMEQKANVSLSEILKCPRNNKEEAKTFLKFCLYCIEEDTQKYGEPYWHRFHQVPGVIVCPIHRIALNNSLVSIETKEIHYHAPSDDNCPLNTSTTIYNDATLQKLLVFANNIEWLINNNFTFKGLSWLRSHYKTYLTNKNFITVFSKDKFIFHEQEFYNAVLTYYGQEFLEAINPKIIKNPEKYFSNCLLACDVNPVIDRIIHILIIKFLANSIEDFFKA

SEQ ID NO: 255 - protein, 230 aa, Nostoc sp.
MAIDYRLTVDNCYKETLACTNRKEFLTCQLQLIYADLSFRAIGQIIAIDHCYHLYSGISKFQPKLHDSKVVRICRITGNPDKFGKLHLNQNSRLRIRLPVDKIPLFYSLAGKSLRIGEDTIRLSIPQIELLQPTEKLRSRIVIIKRCQEPRSFLKVAQRQIEQLGIKGTVNIQANFDGTPKRRTIKVKESTLVGFGLEVKHLSEEDSLILQAYSIGGKHKMGCGFFVPLK

SEQ ID NO: 256 - protein, 504 aa, Nostoc sp.
MSIAKSSVKSRIRLNLSDPSLTRLHIAGVAGLWMTLGQLEKLYPESAKRPSNLTWSRTPHSISLDWDGEEDFIVLDWLLKQSFKISDEGLIDLPGVNSQTGNIQTKIIKHLGIRGTFLQHNKSFKSAGNVSTVLIDEMEAIVLYKKVDEYAHQVFAKHLCNKQGQLLQEPIGIVGWLYPGAVIRHEVFREETKFHEKPELALALLFAPVACQYFVLGSHLEREKPHFILVIPQVTDLEAYAQHCWNLTDLDFDYFHASSLGDAGLRFLTYETNVQQTAFNPVERCLVILFGKAAWSKQQKTRTETAFLQASETVNSVYKLSCIFFPNYQNFKSKNETPIIANILRGIIADNLANSLPWWFNLSTKVQDNYLLELSNDDNQGIYKMISNSQWDIETQKLFIKCVHETLKIRYAKIYARTKEDEYVQIERENIRIVSQLKRCTNAVNFRKFIAEFWGKTGHNPILQEHLDEILSITSGIMDWKIAKDLTFIALASYPKIKTTESNI

SEQ ID NO: 257 - protein, 323 aa, Nostoc sp.
MFHLFGNILTSYGTAANNRGDNEGNVTPLQKLDWKGEVHTTVSSEAIRWALRYYWQNFGYLVNRRWDENAQPVANHIMQDHNFDDIRFIDDDVLGFMQAEAAKMEASHESEGESEGASQDNNKKNSKGKDKQTSRRKGQQKLKGKITARRGVLEVTRAVSMIPFMGDITFNAVSGIKNRNSLYATEIHATRYQYGFALTPDSLKDKSRIHAVLDGLISIGEVAGNHARFLYDFSPESIVLRWTHDSSPRFLYCFEEDERRNITVPDLVRRVEAGDIDPKELWIGGAISKTLEDLGANVFPGVKALVEALKQVIAEDLQLALRS

SEQ ID NO: 258 - protein, 210 aa, Nostoc sp.
MTTIALKVEVPVACFRQSRAREYVETYPVPPPSTVYGMLLSMIGEMNRYTHCGTQLAIALLSEPKKSTVIRKFHRFKKLDINDPSNIKPDYQELLTNIEFVVWIIAGTDKSKPTLPERLHLALTNPASINRFGGLCLGESRDLVNSVSFFSEKYEGESFEWLVQNEEGLLTLPYWVDHVGSQGTRWQRYMLQKSLGRQPPELSWTVIQTA

SEQ ID NO: 259 - DNA, 110 bp, Nostoc sp.
  source 1..110: mol_type = other DNA
acgctctctactcctgcggtgacaaaattaaaaagttaaacaataagcctaaaagctttacgatataaggaaaagtattagaaattgcttttttttagatgggctttatt

SEQ ID NO: 260 - DNA, 688 bp, Nostoc sp.
  source 1..688: mol_type = other DNA
tgtcaactatagaaatatccatacaacatctgtctactatgtaagaggttgtttgaaaatatttaggcatcaagatattcctctatttatttagattaataacaaattagaacagctatcctttatttaaaattagaaattttactgaatttaattaattttttggtaaaattaattaaattctacggttatcatttgatcataaaataatacacccaggttgtaatattttttcaattaatccaaccaacgtaatagtctatattagttaatagtctataaagctataaccgttgctaaataagctttacatggcttacgcttatataatttattatatatttttatgattattgataataatatacatcataaagtttccaaatgaaatcttttaatttgtacattttttagtattgaaaatatttactgcaataaaacaatttttctatcaagtattagaagtaaaagagttgacaaaaaataataatcatgatttatgcaaggtaagaaatgatttaaatttacactactgacatcagatccttatccaataagcatttgagcaatctcaatttgatagtactatcagaaaagttgcattattttcctgtcttaagtattaggattattacagactattaacttagcctaagttaactttatactcagtgtttgttcaactgat

SEQ ID NO: 261 - DNA, 320 bp, Nostoc sp.
  source 1..320: mol_type = other DNA
aacgcctaaagacatcttatattgaaaagctaaatcagcaggagtgaacttaatcacaattttccgtttataaacgcctaaaggcaatctaatattgaagcagggcaatagttgccagttacaatttacgatctctctcgtgatcaacgcctaaaggcaatctaatattgaagcaggcataacaataatcagggattgcgatcgcaagaacgtgatcaacgcctaaaggcaatctaatattgaagcagtactttgccagtgttccagaaatgataaaggctttgtgatcaacgcctaaaggcaatctaatattgaagcag

SEQ ID NO: 262 - protein, 272 aa, unidentified
  REGION 1..272: note = Synthetic
MVRGRREWTQAKYERYIKEGRGRGSGKNYKPWLTIQDFPSKGRSSRIPGWKTNRVHHFFSDHEKRLFYLFEWSDIVTDIKEQFPLDNLDLAMSIATDIGIKYPVDTQTGTPYVLTSDFMLTVNRNGKQIQIARTVKQSTELEKKRVNEKLEIERQYYLAKGIDWGIITEKEISRLLAENVEWVHSAYRLEANSEMDTSQLHELSTILKSKLQEEDATINKITTTLDKEMNVNYGTSLYVFKHLIARKELIVDLVKIKLSACPSTEVIQKIVF

SEQ ID NO: 263 - protein, 742 aa, unidentified
  REGION 1..742: note = Synthetic
MVKGLFVNDLIEWTLDLNVHIVERIIWIDEGYIIAFVIDINAKKGLPEPKKISEILEAISEGIAFKQQQDPWARIVRDENLTDREKEYRNKAWKIISSLVTEEPSIYYRNFRGSLVKKVVEKHNLERNKDKLVEKTVYGYLRRFWQRGKNINALIPDFINSSGKGKIRGQSSNKRGRPRKYAHEPDIGEGVNVTEEDRKIFRIAISKFYNNSKENYLTTAYELMVKNYYKEGIRYDENGVQKSILIPADKIPTITQFKYWYQLEQDDVTKTLTSRKGAKKFALENRAILGTSKMETIGPGSRYQIDATVADVYLVSKYNRDWIIGRPVIYVIIDVFSRIITGIYVGLEGPSWMGAMMALANVATDKTLFCQEYNINITEDEWPCNQMPDTILGDKGELAGMSVETLIPNLYVHIENAASYRADWKGLVERHFRIIHEYVKPFLPGYIDTDFRQRGARDYRLDGKLDIDQFTEIIVRLIVHHNNKPLKEYERDEAMIVDDIPPIPTELWKWGITNRSGRLRTFSEDIVKLNLMPTEKATITAKGIKMRGKEMYYTCDSAEKRQWFEKARSNLLSKSDKSLIVSYDIRNPNFIYLPSSDGRDFEKCFLIDSEGRYANKNFHDIEYLLAYEELQRQKSQGKQLQEKVDLIADIESVVDRAGKMTDAAKEPNLSKTKKLSGIRENRAFEKAKRRESEGFELANTENQNSFQAVESKLETSEQPESLQPNHLDLLRKNRQERKRGQE

SEQ ID NO: 264 - protein, 562 aa, unidentified
  REGION 1..562: note = Synthetic
VDRNEGELIRIPNGELAIVARYIDQKLPEYNANPLIQALPPILSAKEFLNKATRTPEFHEEEKELEAHYRFHCIERLSRYFDPQNKTVELQKVICALIMTGYLARNVLKPEYASRSRQIYNAIKDGGGKNLENYVNLPTSASGLTLIGPSGMGKSTNFQNILNLYPQVILHPDHSVYQIVWLKVDCPHAGSLKGLCTDIFLAVDRLLGTNYFKKFGSSRNSEDYMLAQVAQIAHTHHLGVLVIDEMQNLVTARRSSSDMLNFLVKMDNTIGIPVIRVGTNEAFPILQGNFRNARRGTGEGSVIWDRMVNNDEWSFFMEGIWEYQWTKTPVPFSDEINEVFYNESQGIIDIAVKLYKMAQWRAISIGGKEIITTNLIRQAAKDGLYLVKPMLDAIRSGDKEWMIKYKDIAPLDTTEYQNKCLSELDSDDLKEIQRLARKQQNQQKVSPKLNYVILELLKLEVEAARAKECAEQVIVSGDENVDITFLVNKAYALALQGGQENGNLVKISKNKAKFKPKYVENDIRRTVENAQKEKKSAYEGLKLAGIIKDPVEDFINMSHIDA

SEQ ID NO: 265 - protein, 315 aa, unidentified
  REGION 1..315: note = Synthetic
MLSFFPTLYPDELLYSALARYHIRSGNKIFKQTDLELFGYSSQQVCKITLTNHLNYLVKNLPLRSHQTVGNLLQNHTLYPFYATFLIPQEAWLLKDSMSKKLSGSILKLAKVANGSSGESKKFLKFCPQCLEQDTHQYGEPYWHRTHQVPGILVCPTHGVFLCDSSVAIESKGIHYYAASLDNCLTVTGLKSLTNQALKTLVTLANDINLLIHGNFAFKGLAWLRAQYQHYLVSKGLLQIFPAGKFKFDEYGFSKLIFDFYGQESLEALNPKLTQHQGKYFSHCLLGCDLNPSIDRITHILIIKYLANSIEIFFL

SEQ ID NO: 266 - protein, 638 aa, unidentified
  REGION 1..638: note = Synthetic
MLGFFPAPYPDEILYSILARYHIRSGNTSPKITLRELFNSQDVIATVDLPSNLNSLIENLQFISNYQIEDLIYKYTLYPFYSVFLPSKRASQVMESMKADFGGDIHTRTGIMASSLKMQRYLRFCPKCLEEDLQNYGESYWHKLHQTPGVLVCLVHGVTLQDSTIPMQGFNRHEYYAASLENCPVIPIQETYSQETYSQETLKKLRLLAQDISWLINSNLFSRELEWFQRKYIALLIEKNFATATGRVNQKRLLDNFLFFYGAEVLEAVNSMVNYENEQNWLFSIVRKHRKSFHPIRHLLVIRFLTNSIEEFFNTDYQYKPFGEGPWLCLNAAVNHYLKPVITNLVVTHCLDNKKPLGTFSCSCGMVYCRTGPDETDEDKQRIGKVLTYGQFWEQKLKELVEIQELGLRETARQLKVDSRTVKHYTAILKLKTFWKSSQKNQLVDSQEVLDSNLNLASDDRIKYREVWKALQQQYPEASKTTLRGLAKGTYIWLYRNDKEWLNKNSPSLKVPLPCVGKVDWAERDKQVLEKVKTAVRTFLSAEKPARVTICRIGKSIGLLALLEKHLAEMPLTKVYLESVTETVEDFQIRRIKWAIKRLDDCGEEIQPWKVIRLAALRENRSQRVQAALETELYKQPD

SEQ ID NO: 267 - protein, 233 aa, unidentified
  REGION 1..233: note = Synthetic
MIIDCSLPTQIPPESPLNLTKQRKLLTSELPYIELIFNLIGETVPLDHGYELFSAIAHFEPELHKLDTVGIHTIAGIPKPGVIQLTKNSRLRIRLPMDQVRLVYPLAGKPLRIGKHTIRLGIPEIYLLEPAEKLRSRIVIIQGYQEPESFLTAAQRQLEQLGIQGKAFITKNTDGSPKRRSIKIKRFTVVGFGLEIINLSNEDSLTLLRYGIGGKRKMGCGVFVPVKRKGNAS

SEQ ID NO: 268 - protein, 511 aa, unidentified
  REGION 1..511: note = Synthetic
MSIVASVVNPKIYLNLGDPSITWIHRAGIAGLWMTLKQLEKLHPIPAERPGNLTWLLTPRSISLEWQGQDFVVLDWLLKQSFQINKEGLISLTGLNTHSIKIETQINIHLGITGTFLQHNQVFKFDGGKSWSLIVDGIEIDVEYKKAVSYAHQDFAKQLCDKQGQLFGQSIGVAGWLYPGSVVRHVAFTKKTKFEEKPQLAFALLYAPVACRYFVLRSHIKLEHTQYALVIPEVVDLEIYAQEYWSLGNLDYKDFHVSSLGDAALRFLTYETIIELATPDQVKRCQVILFGTVVWSKQQKTRIEIGVVEATEIIDFIYKLSRIYFPEYQIVKYKNKNLIISNVFTGTIADNLVKGFPWWANLYTTFKNKNLFKFITNDGVYKMIQNAEWNLESQKLFIKACHEALKKIYAKIYGRTNEGQYAQIERENIRILSQLGRCTNAENFRKFIAEFWGRAGQISILEKHWEELLPLTSGIMDWKVARDLTFIALASYPKSNMVEKEILEISDSNSE

SEQ ID NO: 269 - protein, 324 aa, unidentified
  REGION 1..324: note = Synthetic
MFHLFGNILTSYGTAANNRGENEGNITPLQKLNWKGEVHTTVSSEAIRWALRYYWQNVGYPVNRRWDENAQPVADYVLQDPNFDDIRFIDDDILGFMQAEAAKVEASDESGGDAEEASQDENKKSSKGKDKQTSPRKGKQKPKGKITARRGVLEVTRAVSMIPFMGNITFNAVSGVKGRNSLYATEIHATRYQYGFALTPDSLKDKSRIHAVLDGLISIGEVAGNHARFLYDFSPESIVLRWTHDFSPRFLYCFEQDELGNLSVSNLVRQVEVGDIDPKELWIGGLISQGLEDLGANVFPGVKSAVKALKQVIAEDLQLSSGGN

SEQ ID NO: 270 - protein, 208 aa, unidentified
  REGION 1..208: note = Synthetic
MTTIALKVEVPIACFRQSRAREYAETYPVPPPSTVYGMLLSLIGETDRYKHCGTQLAIALLSKPEKSIVIRTFRRFKTKDIHDPKNTKPDYQELLTNVEFVVWVKTDKAKPTLPELLQQAFANPASINRFGGLCLGESRDLVNTVTLLSEKYHGESLWWLVTDEDGSLTLPYWVDHVGSKRTRWQCYELQESQVWQPPDLSWTTIQTS

SEQ ID NO: 271 - RNA, 130 nt, unidentified
  misc_feature 1..130: note = Synthetic
  source 1..130: mol_type = other RNA
tagtttattaatagaggtagtagctgttgtggaggagtaattcggttcaacaaaatataattcggttcaacaattcataaaacgattgaacaataacctctaaagaagtacgattgtaccaagtaaaagt

SEQ ID NO: 272 - RNA, 674 nt, unidentified
  misc_feature 1..674: note = Synthetic
  source 1..674: mol_type = other RNA
ttgtacaatcatctgagtaacctcattgatggggtttaacaaaagtcgatcgcagtctcttcccggagggcgatcgcctttgtcttgttactatattgtagttacctgttattactaaaacaatagcgttactacaaaattttcaaaattcgccacaattaaggtaaatagagttattacagattgaaagttttcagcagaaagtagtatggcaaagcggcagacaacaaaattgagcaatcagatcattgttagaatggacgatgagacaaaggaagcttttatgaataaagctaaggctgaaggcaagacagcctcagaattgatcatgggatggattcgttcttacatggctgaagaactccaaggaactccagacttagccaaaatgcaagcggacttggagaatctaaaacaacaagttgctgcactccaaaatgaatacttgggaaaattagcagcctgagagaagagaacgattctctcaggctatggatagatcaaattatcagttctgcccctaagaacccaaaaaacccgtcagatgcctgacgggtttagttttgttagggagattaactatgggaagatatgcagttactacgagtaataaataggtagtaactaaatttaagattccgatcgcactcaaatccgttaacccataagacttt

SEQ ID NO: 273 - RNA, 459 nt, unidentified
  misc_feature 1..459: note = Synthetic
  source 1..459: mol_type = other RNA
tgcttaacgtctgacgacatctaatgttaaagaatactgtaccaagggttccccttaccccatatcccattgttcaacgtctgacgacatctaatgttaaagaaccttccgatagtaatcccaggtttgctgaataaattctgctcaacgtctgacgacatctaatgttaaagaacccctttacgtaaaaactctgggggcaatttggaaactgctcaacgtctgacgacatctaatgttaaagaacaagagcttgataaatagtattaagttcaactatcactgctcaacgtctgacgacatctaatgttaaagaactaatgtttccttgaattccctcaatttggcatcaactgctcaacgtctgacgacatctaatgttaaagaacacggcgttgagtgcgatcgctgaaagcctaccgtctgctcaacgtctgacgacatctaatgttaaagaac

SEQ ID NO: 274 - protein, 272 aa, Nostoc sp.
MARTKQEWTQAKFERYMKEGRGQGSGKNYQPWIKIQDFPSKGRVSRPPGWKTNREHHLFSDHEKRLFYLFEWSDSIIDIREQFPLIDLDLAMNIATEMAIEYPKDVNNNTPYVLTTDFMLSVKQGKQIVEKARTFKLVKDLGIKSVAEKFELEKRYYTAKGIDWGIITEKEIPTLLVKNVEWIHSSYKLEAAAEINVDELNNIANILKSKLQESDSTINKITNCLDKEMNLEIGTSLYIFKHLLANKKIIMDMQTNAISSSISAREIQKIIF

SEQ ID NO: 275 - protein, 742 aa, Nostoc sp.
MNNNLFVNDLIEWIDESGNNFVERIIWIDEAYIIAFTIDINIKTGFPVSKRVSDIQEAIYEGRALKLRTDPWARIVRDEDLSAKEKEIRDKYWDIISSIVIQEPSIYYRDKRGSLIKQVIEKYNNNKSEGKLIERSVYQIIRRYWQRGKDKNSLLPDYANSGGKGKVRASREKKRGRPRKYAHEPDIGVGINITDEDKKIFRLAVTKFYHNQKENFLTTAYDLMIKNYYSEETIYDENGVKKHILIPPDKRPTLTQFKYWYDVEQGDIRKKIISRRGAKKYALEHRAITGNSTMETIGPGSRYQIDATIADVYLVSAYNRNWIVGRPVIYVVIDVFSRMITGVYVGFEGPSWIGAMMALANAASDKVAFCKEYGIEITEDEWACHHIPDAILGDRGELAGMAVETLIPNLGIRIENAAPYRADWKGLVERHFGIIHGHIKPFVPGYIDKDFRERGARDYRLDSKLDIEQFTEIIIKIILYHNNEHYLDNYERDEAMIADDVPPIPRELWQWGIANRSGRLRTIPEDIVKLNLMPTENATITERGIKFKGMYYTCQKAKNEFWFEKARSNSLSRLEKKLEISYDIRKPDYIYLRSPDGRNFEKCFLLESESKYFNKNLHEIEYLFAFEELQKQKNKGLKQQQKVDLIAEIESVVNKAKKMTEEMKDDKLSNRKRTAGIRDNRSAEKSKRRKIEGFELEKSDHENTSNTVDIESQKVEQPQSLQPNYLDILRQKREERKREQDK

SEQ ID NO: 276 - protein, 562 aa, Nostoc sp.
MNKINDWKWVEIPNGKSAAVAKYNDHKLPEYNNNPLIQALPPILSGEEFIEKAIILPSYAPEEREMDAHRRFHCVERLSRYFQPLNKTVNLQQVMCALLMQGYIARNISKPEYARRSRQIYEAIKAGDGRNLDVYVNVPTSTSASGLTLIGPSGMGKSTNFINILNLYPQVILHPEYSTYQIVWLKVDCPHAGSLKGLCTDIFLGIDRLLGTNYFKKFGASRNSEDYMLAQVAQMAHTHHLGVLVIDEMQNLVTARRSCSDMLNFLVKMDNIIGVPVIRIGTNEAFPILQGNFRNARRGTGEGSVIWDRMRNDDEWYFFMETMWEYQWTKISTDFSDEFNDVFYDESQGIIDIAIKLYKMVQWRAISLGGKEAINANLIKQSVKDGLFLVKPMLNAIRSGDKEWMIKYKDIAPIDTTEYYNNCLSNLETKDLKEISRLAKKQQAENGHLSATQRHIILKLLELDVEPQLAKECAVQVINSGEEDADIPILVKQAYALALGGQVQEATVKKVRTHTLKAKPKYQINDIRQIAEKAKKNQTSAYEGLKSTGIIKDPVQDFITIT

SEQ ID NO: 277 - protein, 315 aa, Nostoc sp.
MLSFFPTLYPDELLYSALARYHIRSGNKTFKQTDLELFGYSSQQLCKVTLTNNLNYLVKNLSLFSQLTVSDLLQNHTLYPFYASFLIPQQAWQLQDSMRKKLGGSILEVAKVANHSADNSTKFLKFCPICLEQDTQEYGEPYWHRIHQIPGILVCATHRVVLHDSSVAVDSKGIHYYAASPENCLTNQNQVKCADNTVEKLLILAHDIWNISTINIPFKGLTWLRNQYQSYLINQKFMTLLPGEKFRFNEKSFSNSICDFYGQEFLEIINPNLIRNPDKYFSGYLLACDLNPVIDRITHILIIKFLANSVEIFFT

SEQ ID NO: 278 - protein, 636 aa, Nostoc sp.
MVSFFPKPYPEEILYSVIARYHIRSGNTSPKITLQELFNSQTTVATVDLPSNLNNLIQNLQFISNYQVEDLIYKHTLYPLYSPFLSANRSSQVLESMKGDYGGDIHTRAGIMASSITMPKYFRFCPTCLEEDLKTYGEPYWHRIHQIPGVLVCPFHAEVLQNSLVPLHGFNKHEYHAASTDNCSITKESTFFSTDILKKLLLLAKDFWWLLNSEIPCQEPQWFRKQYTNLMIEQRLATATGRIYQKRLLDNFLFFYGREMLSAVDSMVNHNDSNNWVTSIVRKHRKSFHPLRHLLIISFLKTSVEEFFKQDTEYKPFGESPWLCLNAAAEHYLQPVITSLDITLCCDTKKPVGTFSCSCGMIYCRTGPDETDEDKLRIGKIKTFGQLWEQKLKELVEVEKLGLRETARRLNVDARTIKRYVSRLRLTTYWQTRKENDSVGLQELPEIDPNFATELKLKHRQNWMVLQVQNPEASKTTLRKLAPATYIWLYRNDREWLNQNSPALQVAVPSVVRVDWHERDQQILTQVQDAVRSLLNAEIPEKISISRVGKTIGLLALLEKHLDQMPLTKAYLESVVETVEEFQMRRIKWAIKLLDECGEEIMRWKVVRVAALREDCSERVSAFLESELEKAYKKER

SEQ ID NO: 279 - protein, 222 aa, Nostoc sp.
MGDNFHVSTQSHATEVLNPQLIYVDLSFRVIGQTLPIDHGYALYAALTHLQDKLHSLDDLSIQTIPGIPDGNDSLHLNNHSRLRIRLPVDKIPLVYPFAGKSLTIGRHKIHLEIPQMYLLQAVEKLRSRIVVIKGYEEPKGFLAAAQRQLEKLGVQGIASIPTKADGKPERRSIKIKKFTVVGFGLEVTNLNDEDSITLQKYGVGGKQKMGCGVFVPVNEKR

SEQ ID NO: 280 - protein, 510 aa, Nostoc sp.
MINTTANSKIQLNLSDSSTTLLHRAGIAGFWMTLKQLEEIYPNPAQRTGNLTWVLTPHSISLNWEGQDFAALDWLLKQSFQISDEGLIFLTGLNPKAIHIERQIIIHQGITGTFLQHNKFFKFSDKKLKSIIVDGRQFVTEYKSAMSYAHQHFAKKLCDESGQLLQEPIGIVGWLYPGAVVRHSAFPKQTKFEEKPEYALALLFVPVACHYFILRSHTKPQSTNYILVVPEVNNLEFYAQHCWNLSNLSYRDFHVSSLRDAGLKFLTNEAAIQIKQNCVKRCQVFSFGTLIWSEQQKVRTETATLELTEKVSFYYKFSRSCFSNYRIVDYENQHFILTSLVQGIIANNLGLGLPWWNDFGNILTSSNLFNQIADENQGIYMMIQESEWDIESQKLFIKACHEALKVIYAKIYSRTKENEYAQIERENTKIISQLGRCTNAENFRKFIAEFWGKAGQLSILEEHWEELLPITTGVRHWKMSRDLTFIAIASYPKSKNIKPESSEISQTSSE

SEQ ID NO: 281 - protein, 332 aa, Nostoc sp.
MSHLFGNILTIYGTAANNRGENEGNITTLQKINWKGEVHTSVSAEAIRWAVRYYWQNNGYEVNRRWDENAQPLADHIWQDTNFNSVRFIDDDVLGFMQAEAARVEAGEQSGGEVQEASAGEIQNVSQDEETASPKGKGKKTSQRKGRERSQGRVTAKRGVLEVTRAVSLIPYGGNITFNAVSGTKGRTSLYGTEVHATRYQYGFAMTPNSLQDKSRINAVLDGLISIGEVGGNHARFLYDFSPDSIILRWTHDFSPRFLYCFEQDEWGTISVPDLVRRVEAEDIDPKELWIGGAIARDLGNLGANVFPGVKKVVEELLKVITRDLQLPPRSS

SEQ ID NO: 282 - protein, 210 aa, Nostoc sp.
MTTIALKVEVPIACFRQSRAREYVETYSVPPPSTVYGMLLSLVGEENRYTHCGVKLAITLVSEPAKSTVIRTFHRLKTKNIHDPKNNKPDYQELLTNIEFVVWVDPGVDKARPNLVQRLEEAFTNPASINRFGGLCLGESRDLVNDITLLPKNYYAESMRWLIKDEHGLLTLPYWVDHVGSQGTRWLRYELQECQVLQPPELSWTSVQSD

SEQ ID NO: 283 - DNA, 120 bp, Nostoc sp.
  source 1..120: mol_type = other DNA
aatcgagaaatattgaggttgtggaaacataataaagttgtacaataaataataaagttgtacaatgcctaataaagttatacaatttctcctatgggtgagtataattccatctgtagg

SEQ ID NO: 284 - DNA, 407 bp, Nostoc sp.
  source 1..407: mol_type = other DNA
cttccatattatcggctcaacatgaaatagagtgcgatcgcctccctcgaaactaaactgttgattcagctttgtactgggaatgcgatgcgatcgccactaaatcttggagtaaatattcccaaatccttacggggaagtaatttgcaaaattgtacaacttttttatttctttttggatagtagcctgatgaaattgtagaactttattttttcaagacttcttagtaatcaacgatataacaatccttgtagccgcgcaaattatacaactttattatatttatacagaggttgtagagaaataattcgattcaacaataaagatgttaaaaataacctctaaagaattactaaaataattgcaaatagaggttatttttattggaacagagacaaaacaggtt

SEQ ID NO: 285 - DNA, 397 bp, Nostoc sp.
  source 1..397: mol_type = other DNA
atcttcagtgatagatgcttgtaaaattgaactagagcttaggcgagtcaacaagtttggcgatcgccgtgcttcaacattagatgccattaggcgttgagcaggcatcgtgcggggtgagaattgggtttacgaaaatgtgcttcaacattagatgccattaggcgttgagcaggtagttagtaataattaattctttgcccttttttacttgtgcttcaacattagatgccattaggcgttgagcagagtctagatattgcaacattaacattctgagggttctgtgcttcaacattagatgccattaggcgttgagcaggaagattttaattatcgccatgtcggggaaatagaagtgcttcaacattatcagatgctgttaggtgttgagcaa

SEQ ID NO: 286 - protein, 270 aa, Chamaesiphon minutus
MVRSKRDWTEEKLDRYMKEGRGHGIGRDYNPWIKVSDFSSSGRVSRVLGWKTSREHHFMSDGETRLFYLFEWSDRIVDIREQFPLLDRELCFKIAEDMGVEYPKDPKSGAPYVLSTDFMLTVTHKGKNTYEARTFKPSKSLNNKRTAMKLELERRYYAIKEIDWKIVTEKDIPKLMIKNVEWIHSSHKLEGNKEANKEELHHIIKILRSKLETDTTTVGKVVNDLDIEMNVGLGTSLYLFKYLVANKLISVDMLTEKSLTFFPTKDLKFN

SEQ ID NO: 287 - protein, 748 aa, Chamaesiphon minutus
MQVHLFVNNLVEWISEDGKNQIDRILWIDEGYEVAFLINIYEEKSLPRQVFINEIEACIKSSAAIIIKKDPWVLIVLEEELSSKDKILRDAAWRIISSIVTQEPPIYERNQRGSLVLKLIEDHNTTRSSSEVEGKLTKKTVYKYLKRYWQRGKNINALLPDYKNSGGKGKQKLAGDVKRGRPRKYANDPEIGIGVNVTEETKMTFRVAISQFYHTSEKRSLVAAYEKMIQEYYSEEDLSNYDDLHGSIAMQDRIPSLVQFKYWYDLEHGQNVEKKISTRIGKREYLQNYRPITGNSTAEVTGPGSRYQVDATVGDVYLVSSYNRKWIIGRPVIYVVIDVFSRMITGVYVGLEGPSWLGMMMALANMAMDKVEYCRQYGIDISEDDWPCHHLPDAILGDRGELISKNANIVTQNLNIKIENAAPFRPDWKGIVERRFRIINEKVKPFIPGAVDIDFNQRGGRDYRLDSKLDLDQFTQIIIRMILHHNNQHMLKDYPRTVEMIADEVLPIPAQLWKWGIIHCSGRLRTLDPDIIKLNLMPRGNATITEKGIKFKGIYYTCDRADKEMWLSNARAGSLSRAEKKLEVSYDPRKTDYIYIPAQDGRSFTQCILIAPDSKYKSHNFYDVGYLFAEEELQRQKSANRELPQTIDLNKEIEKIVDRAVDMTNAVQDPTMSKLARTSAIRDNRSIEKENRREEESFDLSPKEKDSSKILSKTDPDKSSSISPQPSLKPNYTDLLRAKREKNKRGKN

SEQ ID NO: 288 - protein, 559 aa, Chamaesiphon minutus
VEKTDDKITIPQNIDRKHMGVEAIYIDQKLREYNENLLIQALPPTFDNEEFIDLVYEEPEYNDDEVCLNKSERFHCVARLSSYFDPQGKTIELNNNISILIKRGYLARNPLKPTFALRSRQIYGAIENSSGRELERYVSQPTSASGLTLIGPSGMGKSTNLHKILSLYDQVIFHPKLSTYQIVWLKVDCPHAGSLKGLCTDIFMAIDKLLGTTYHTKFSSRNHTEDLMLAQVAQLANTHHLGVLVIDEMQNLVNARRRKDDLLNFLVKMDNIIGVPVIKVGTNEALPIFQGNFRNARRGTGEGSVIWDRMQKDDDEWDLFVENLWKYQWTRKKVELSTALEEAFYDETQGIIDIAIKLFRMVQCRSIALDGDEAISVDLIRQVANDGLHLLKPMLAAIRNNDKEEMLRYKDIAPLDILAYEQKCLKKLHELTLRKNKQLQDHKIDSNLLRATIAELLELDVSPHVAKECAEQVITNNKAEADISVLVKQAYKLSLVGSTGHTSALVKQQPQPKKKKVEPAYQKDDLRQIVAKAIDSNTSAYEDIKSVGLICDPVAEYIN

SEQ ID NO: 289 - protein, 319 aa, Chamaesiphon minutus
MCALASFPRLYPDELLYSGLARYHIRSGNQSFRQTDLDLFGYSSQQACRVTLTNNLKGLVKQIAHISDYRVRSLMEHNTLYPFYAAFLSPIEIRKLGSATIEKRSGSILEQARVDLDSTSDRRKYLKFCPLCLTTEIEQYGEPYWHRLHQIPGLVICTQHRILLLDSSVLIDSHGVHYHAASDENCIVDMEQSELAPDSLKHLLEIATDLVWLVDTRIDFRGMGWLRDRYIAQLCKRGSVKKLLRGEFKFDERELFQSFRDFYDEESLNWIEPRFVDTEGKYLIHCLFAGDLDPKIDRVAHILIIRYLFGSITDFVMSH

SEQ ID NO: 290 - protein, 218 aa, Chamaesiphon minutus
MTILPDRTSEERDCCRSCSEEFGDYLFPVEGQSIGVDHAHPLYGGISQIIPEFHESNSIGIFGINGKLSGAYSKRLNIDVDSVLKIRLPLDLSRSIYKLAGKTLQIHQDKIYLGIPELELIVPSQNLEARIVTIKGFLDASTLDTAAQNHLDRLEIVGKVRVLTRSDGQPRCRTVKINKKKVVGFGVRVEGLSDLDSLMLQQQGIGGRRKMGCGLFTP

SEQ ID NO: 291 - protein, 275 aa, Chamaesiphon minutus
MKSLYSPAHPTKLSKSEFGIAANGWSDAALKFLLKTTVVNQQSQADIHRCLVIPFGKVTWSKQQQTRLAAETIEIETQHLELYQTFCGESRQDDPLSQFIAENLIRGKPWWWGFTDVFIHKKAYLAIKFRQDRIHDMVKKTEWDTESQELFVRACHQGLRITFGKIGGKTKEGDYPQFERKVIQLRSNLERCQNASAFRDFITSFWGNAGNIQVLQESWQKLLPLTTGQSDWKMAKSLFFLALASYKGEEKLPDPDKLPAEDPSTAITEPEVRHV

SEQ ID NO: 292 - protein, 181 aa, Chamaesiphon minutus
MFNLFGNILTAYGVAANNRGENEGNISKLQKLLWHGETHTTVSAEAIRWSLRYTWQRQGLPVNRVWNPLILESTWEDPNFDPDKYLDDDILGFMHAEAAKIDDAEEDPEVPPIPAKGRAKGKPKPKGTAVKRRGALDVTPAVSTRPFHGDVTFSARSGVKDRNSLHATERHATYYQSLVTS

SEQ ID NO: 293 - protein, 212 aa, Chamaesiphon minutus
MTINKIALQVEVPIACFRDSRAREYIATYPVPPPSTVYGMLLSTVGEENRFRHCGVKLAIAMLSETAKSRVIRKVRRFKERDINSSKNSKPDYQEILTGIKFVVWIDAAEDRSILNLAERLHNAMVNPSSVVRFGNICLGESRDLVNSIDLLTNEHQQGALKWLTQDEYGEITLPYWIDRLGSERTRWLRYRLIKSVDWKPPALSWTQIQTD

SEQ ID NO: 294 - RNA, 128 nt, Chamaesiphon minutus
  source 1..128: mol_type = other RNA
aataattagtttagttattgtgataacactgtgataacacaataaagtcgtatactaaataataaagttgtatactgactaataaagttgtatactattgtctgtgagtgtttacttagcatttgcag

SEQ ID NO: 295 - RNA, 554 nt, Chamaesiphon minutus
  source 1..554: mol_type = other RNA
ttcactgcgagcaagacattagtcgtatttttgacacttaactgagaaaagattgagctagaacctaatcagagcaaagcttttgagatagtatacaactttattatctctatctggatagatagcgcaatcaaagtatacaactttatttctaaataattgaaaaatggcgacgagaaatcaaggttttcagcctttaacagtatacgactttattatgtttttacacaccattcattacgaaagcattactattcgtagttgcactaatgtttgctgtgttaatatttgttagattttcaatttcaataaaaatatttactgtattgattgtaatactagtttgcattttattaactatattttaatttgaaattttggaatttaatttatactgccgtgtaaccgatcgattctaataatatctaaaccttctaaatcgatcgaattttgacacagttaatcaaagggtaatttaactgttatataggatgattttgaaatctcacccaccctaacaagcaatcctgaaggcgggtgagatgccatttaga

SEQ ID NO: 296 - protein, 272 aa, Trichormus variabilis
MVRGRREWTQAKYERYIKEGRGRGSGKHYKPWLTIQDVPSKGRSSRTPGWKTNRVHHFFSDHEKRLFYLFEWSDIVTDIREQFPLDNLDLAMSIATDIGIKYPVDTQSGTPHVLTSDFMLTVNRDGKQMQIARTVKPSTELEKKQVNEKFEIERQYYLAKGIDWGIITEKEIPRLLAENVEWVHSAYRLEANSEMDTAQLSELSTILKSKLQEEDTTINRVTTALDKEMNINSGTSLYVFKHLIARKEILVDLVAIKLSACPSTKVIEKIIF

SEQ ID NO: 297 - protein, 742 aa, Trichormus variabilis
MVKDLFVNDLIEWIVYQNTHIVERIIWIDEGYIIAFVIDINAKKGLPEPRKISDILEAITEGIAFKQQQDPWARIIRDENLTDKEKEYRDKAWEIISSLIIEEPSIYYRNFRGSMVKEAVEKYNEERDKDKLVEKTVYGYLRRFWQRGKTINALIPDFINSSGKGKIRGQSGKKRGRPRKYAHDPDIGEGVNVTEEDRKIFRVSISKFYNNPKENYLTTAYELMVKEYYKEGIRYDENGVQKSILTPTDKIPTITQFKYWYQLEQDDVTKTLTSRKGAKRVALENRAILGNSKMETIGPGSRYQIDATVADVYLVSKYNRDWIIGRPVIYVIIDVFSRMITGVYVGLEGPSWIGAMMALANVATDKTLFCQEYNINITENEWPCNQMPDAILGDRGELAGMTVETLIPNLYVRIENAASYRADWKGLVERHFRIIHEYVKPFLPGYVDTDFRQRGARDYRLDGKLDIDQFTEIIIRLIVHHNNKPLTEYERDEAMIADDTPPIPRELWKWGIANRSGRLRTFSEDIVKLNLMPTEKATITAKGIKMRGKEMYYTCDSAKNEQWFEKARSNLLSKSEKSLIVSYDIRKPNFIYLPSSDGRDFEKCFLIDLEGRYANKNFHDIEYLLAYEELQRQKSQGKQLQEKVDLIADIESIVDRAEKMTDASQYHNLSKSKKVSGIRDNRAFEKAKRRENEGFELAITDNQSSFQVAESTAETSEQPESLQPNHLNLLKKKRQERKRGQN

SEQ ID NO: 298 - protein, 556 aa, Trichormus variabilis
MDRIESELVKIPNGELAVIARYIDQKLPEYNTNPLIQALPPILSAAEFIDKVAREPNFDEQERELEPHYRFHCIERLSRYFDPQNKTLELQKVICTLIMTGYLSRNLLKPEYANRSRQIYNAIGNGGGKNLENYVNLPTSASGLTLIGPSGIGKTTNFKNILELYPQIIFHPDYSVYQIVWLRVDCPKTLKGLCIDTFAGIDKLLGTNLLKKFNPARTSEDYLLAQLAQTAHTHHLGVLVIDEIQNLATAKRNRDEILNFLVKLDNTIGIPVIRVGTNEAISFLQGNLRNARRNTGEGSRMWDRMVNNDEWCYFLEGIWEYQWTKTPVHFSDEIKEVFYDESQGIIDIAIKLYKMVQWRAISIGDQEIITVDLIRQVAKEGLYLVKPMLDAIRLGDREWMIKYKDIAPLDITEYHNRCVSEIDAKDLTEIKRLAKKQQNQQKVSPKLNYVISELLKLEVESGKAKECAEQIVYSHEDPDIPIPSLVNKAYALALQGCQVNESLAKTSTRKAKLKTKYQENDIRRIVENAKKDKKSAYEDLKLAGIIKNPVEDFINI

SEQ ID NO: 299 - protein, 316 aa, Trichormus variabilis
MLSFFPTLYPDELLYSTLARYHIRSGNKSFKQTDLELFGYSSQQICKITLTNNLNYLVKNLPLRSQQKVENLLQNHTLYSFYATLLMPQEAWLLKNSMSNKFSGSILDFAKVANNSSDDSKKFLKFCPECLEKDTQKYGEPYWHRIHQVPGILVCPIHRVVLHNSCIEVESKGIHYHAASIDNCLLANNVKKLTNKTVETLSILAHDINWLIHSSFAFQGLAWLRAQYQRYLLDKGLLKTFAGGKFKFNDCGFAQLIFEFYGQESLEALNPKLTQNQGKYFSHCLFGCDLNPAIDRITHILMIKFLANSIEEFFQS

SEQ ID NO: 300 - protein, 672 aa, Trichormus variabilis
MPTSKRLTFHGQSLIAGYVIQINKNLLNDLVIFNNYMVSFFPQPYPDEILYSVIARYHIRSGNTSPKITLQDLFKSQTTVATVDLPSNLSNLIKNLQFISNYQVEELIYKHTLYPLYSPFLPANRSSQVLESMKGDYGGDIHTRAGIMASSITMPKYLRFCPTCWEEDLKNYGEPYWHRIHQIPGILVCPFHGEVLQDSLAPLHGFNKHEYYAASTDNCSITKEPSILSPDTLKKLLILAKDFWWLLNSEIPCQEPQWFRKQYTNLMIEQGFATPTGRIYQNKLLDNFLFFYGQEMLSAVDSMVNHNDSNNWVTSIVRKYRKSFHPLRHLLMMRFLKTSVEEFFQKDTEYKPFGEPPWLCLNAAAEHYLQPVITNLVITLCCDTKKPVGTFSCACGMVYCRTGPDETDEDKVRIGKVKAFGQIWEQKLKELVEVEKLGLRETARRLNVDARTIKRYVSRLKLTTYWQTRTENDSVGLQGVPEIDPNFATELKLKHRQNWMALQVQNPEASKTTLRKLVPATYIWLYRNDREWLNQNSPTLQVAVPSVVRVDWHERDQQILAQVQDAVRSLLKADIPEKISISRVGKTIGLLALLEKHLDQMPLTKAYLESVVETVEEFQMRRIKWAIKLLDECGEEIMRWKVVRVAALREDCSQRVSAFLESELEKAYKKER

SEQ ID NO: 301 - protein, 204 aa, Trichormus variabilis
MSQFPYMDLTFSLTGETLPFDHGYELFSAIAHFEPKLHTLDTLGIQTIAGIPKDGVINLTQNSRLRIRIPVNQVRLVYPLAGKSLRIGKHTIRLGIPDICLLQPAEKLRSRIVVIRGYEEPESFLVVAQRQLEQLGIQAIASIPTKANGKPIRRTIKIKRFTVVGFGLEVINLSDEDSLRLQIHGVGGKQKMGCGLFMPIKERQ

SEQ ID NO: 302 - protein, 494 aa, Trichormus variabilis
MTLLHRAGVAGLWMTLKKLEKIYPTPAERIGNLTWLLTPHYINLDWEGQDFTVLDWLLKQSFQISDEGLISLTGLDSQNMDIQNQIIIHQGITATFTQHNKFFKSAGQQSKQLIIDGIQVRVDYKKAASYAHQHFAKHLCDQYGQLLKEPIGIRGWLYPGAVVRHYAFKEQTAFEEKAEYALALLFAPMACQYFVLRSHTEPSHTNYVLVIPEVIDLELYAHFLWCLGNLDYKHFHVSSLGDAGLKFLNYKTTQMPTSNFLKRCQIIFFSTKAWSEQQKTRAEIAIIELNSSVNYLYKLSCICFPECQIVLYKNQHYLLPSLIKGIIANNLAMGRSWWANWISFIKNKKSFKQFTDEYKGINKMIQDSEWDIEAQKLFIQACHEALRKIYAKIYSRTKEGEYAQIERENTRILSQLKRCTNTDNFRKFIAEFWGRAGQIAILEEHWMELLPLTTGIGNWKVARDLTFIAMASYPKNKITEVEVKPSQISELNTE

SEQ ID NO: 303 - protein, 324 aa, Trichormus variabilis
MFHLFGNILTSYGTAANNRGENEGNTTTLQKLIWKGEVHSTVSSEAIRWALRYYWQNAGYPVNRRWDENAQPVPDHILQDPNFDDIRFIDDDVLGFMQAEAAKVEAAVESEVEIQNSTQDEDKKLSQGKEKETAKRKRKEKPKGKITTRRGVLEVTRAVSTIPYAGDLTFNAMSGKKGRTSLYSTEVHATRYQYGFALTPNSLKDKSRINAVLDSLISIGEVAGNHARFLYDFSPDSIILRWTHDFSPRLLYCFEEDELRNISTPDLVRRVESGDIDPKELWIGGAISSTLEDLGANVFPGVKTTVEALKQVIIEDLQLSLRSS

SEQ ID NO: 304 - protein, 210 aa, Trichormus variabilis
MTTIALKVEVPIACFRQSRAREYGETYPVPPPSTVYGMLLSLVGEVDRYKHCGVKLAIALLSEPEKSTVIRTFHRFKTKNIHDSKNNKPDYQELLTNIEFIVWVDAGVDKAKPNLVERLAEALTNPASINRFGGLCLGESRDLVNDVTLLPKNYYAESMRWLIRDEYGLLTLPYWVDHVGSRGTRWLRYEIQKCPVFQPPELSWTSVQSN

SEQ ID NO: 305 - DNA, 171 bp, Trichormus variabilis
  source 1..171: mol_type = other DNA
tcgcggtttggatgtcgatcagcctcggaatttagcaaaatcagtgactgtggaataaataaatgtggaggaataattcggttcaacaatatataattcggttcaacaattaataaaacgattgaacaataacctctaaaggagtacgattgtaccaagtaaaagtgcgat

SEQ ID NO: 306 - DNA, 528 bp, Trichormus variabilis
  source 1..528: mol_type = other DNA
cttgagcatctgccgcaatcatgtatcgcttttatgatacattctagcaattttacggttggtcattggtcattggttattggtaagcgtttccgggatatttacgttttgtaatcacgaatagattcttgattgcaagatgaattgcgatcgcatctttgtcgcacagcagaactttctcaaataattttgaacttatggaattactcaaaacctttatcagtaatggattcaaacaattgtttaaccgttttatttgagatttttactaaaaatcaagtttaccatagaggttaagctgaaattgttcaatcgttttattttatcgacaacggcagattaaatattcgaactgtaataattgtttaaccgaattctttgtctacaaatatttgtagagtagataagataatttctagatgtgactactatatcacatctagaaatattttttttggcattgcctaaagcaatactgtgtctatctcgccaaaactgatttgttagatggtaatgtcaggttgtctc

SEQ ID NO: 307 - DNA, 181 bp, Trichormus variabilis
  source 1..181: mol_type = other DNA
gtgctttaacattagatgtcgttaggcgttgagcagggggctgggtcatcatattgatctcgctcagtccgggtgctttaacattagatgtcgttaggcgttgagcaacgatcgcaacccttgattcatgaaatgcttggtagcgtgctttaacattagatgtcgttaggcgttgagcagg

SEQ ID NO: 308 - protein, 272 aa, Anabaena minutissima
MARSKQDWTQAKFERYCKEGRGQGSGKDYKPWIKIQDFPSKGRVSRPPGWKANREHHLFSDNEKRLFYVFEWSDAIVDIREQFPLLDLDLAISIADEMGINYPKDPQSNTPYVLTTDFMLSVKQGKNIVQKARTFKLTKDLASKSVAEKFELEKRYFAAKGIDWGIITEKEVPKQLAENVEWIHTAYKLEENADINLEELHNIANILKFRLQESDASINKITTALDRDMNIESGTSLYLFRHLIARKEIIMDMLVNKISSCPSSKEIQKIVF

SEQ ID NO: 309 - protein, 744 aa, Anabaena minutissima
MINDLFVNDLIKWIDESGNNFIERVLWIDEGYVIAFVYDINAKTGFPKPKKVSEIIEAISDGCALKLKSDPWARIVRDEDLSEKEKELRDRAWQIISFIVTQEPSIYSRNYRGALVQQVIEKYNAGRTEGELVPITVYKYLRRFWQRGKNKNALLPDYANSGGKGKPKASGDKKRGRPRKYAQIPEIGIGRNVTEEDKRIFRCAIAEFYNNSKENFLTTAYDLMVKEYYSEDFYYDENGVKKSILIPPDKRPTFTQFKYWYEVEQTDIRKTIISRKGSRKYALENRAITGTSQMETIGPGSRYQIDATIADVYLVSLYNPNWIIGRPVIYVVIDVFSRMITGVYVGLEGPSWTGAMMALANAATDKVKFCQEYDVEISEDEWPCRHIPDSILGDRGELAGMKVETLIPNLDVRIENAAPYRADWKGLVERQFRTIHGYVKPFVPGYIDTDFRQRGGHDYRLDGRLNIDEFTKIVIYLILQHNNHDYLINYARDEMMIADDVNPIPRELWQWGIANRSGRLRTFPEDIVKLNLMPTEKATITARGIKFKGMYYTCEKASKEFWFEKSRSSLLSKSEKSLNVSYDIRQPNFIYLRSPNGREFEKGWLLESQQRYLDKNFYDIDYLLAYEKLQIQKNQGTRLQAKADLIANIESIVSQAKEETEAVLDDTISNRQKVSGIRQNRADEKNTRRKNEAFELAKAESTNADNTKNPINTQSEDSETSKLLQPDHMDLLKRKRQERKRGKE

SEQ ID NO: 310 - protein, 569 aa, Anabaena minutissima
MTIWIYSNGKDRSENVERNEEEVVSIPNGKSAVIARYIDQKLPEYNTNPLIQALPPILSDEEFVDKVTRLPDFDEQERELVAHYRFHCIERLSRYFEPQNHTLELQKVICTLIMTGYLSRNLLKPEYASRSRQIYNAIGNGGGKNLETYVNLPTSASGLTLIGPSGIGKTTNFQNILNLYPQIIFHPDYSVYQIVWLRVDCPKTLKGLCIDTFAGIDKLLGTNLLKKFNPARTSEDYLLAQLAQTAHTHHLGVLVIDEIQNLATAKRNRDEILNFLVKLDNTIGIPVIRVGTNEAISFLQGNLRNARRNTGEGSRMWDRMVNNDEWCYFLEGIWEYQWTKTPVHFSDEIKEVFYEESQGIIDIAIKLYKMVQWRAISISGQEIITIELIRQVAKEGLYLVKPMLDAIRSGDREWMIKYKDIAPLDITEYHNKCLSEIDAKDLTEIRRLARKQQNQQKISPKLNHVILELLNLEVEPAKAKECAEQIVYSDEDADIPSLVKKAYSLALQGTQVNESLAKKSTRKAKSKPKYQDNDMRRIVENAKKDKKSAYEDLKLAGIIKNPVEDFINI

SEQ ID NO: 311 - protein, 316 aa, Anabaena minutissima
MLSFFPTLYPDELLYSTLARYHIRSGNKSFKQTDLELFGYSSQQVCKITLTNNLSYLVKNLPLRSQQKVENLLQNHTLYPFYATFLMPQEAWLLKNSMSKKLSGSILDVAKVATNASGDSKKFLKFCPNCLEKDTQKYGEPYWHRIHQVPGILICPTHSVLLQDSCVEVESKGIHYHAPSFDNCLVATKVKSFTDNALKILFTLANDINGLIHSNFSFKGLAWLRSQYQRYLFDKGLLQTFSGGKFKFDEYGFAQRIFEFYGQESLEAINPRLAQHQGKYFSHCLFGCDVNPAIDSITHILMIKFLANSIEEFFQS

SEQ ID NO: 312 - protein, 636 aa, Anabaena minutissima
MVSFFPQPYPDEILYSVIARYHIRSGNTSPKITLQELFNSQTTVATVDLPSNLSNLIQNLQFISNYQVEDLICKHTLYPLYSPFLPANRSSQVLESMKGDYGGDIHTRAGIMASSITMPKYFQFCPTCWEEDLKNYGEPYWHRIHQIPGVLVCPFHGEVLQDSLTPLHGFNKHEYYAASTDNCSITKEPSIFSSDTLKKLLVLAKDFWWLLNSEIPCQEPQWFRKQYTNLMIEQGFATATGRIYQNKLLDNFLFFYGQEMLSAVDSIVNHNDSNNWVTSIVRKHRKSFHPLRHLLMMRFLKTSVEEFFQKDTEYKPFGEPPWLCLNAAAEHYLQPVITNLVITLCCDTKKPVGTFSCSCGMVYCRTGPDETDEDKLRIGKVKTFGQLWEQKLKEFVEVEKLGLRETSRRLNVDARTIKRYVSRLRLTTYWQTRKENDSVGLQEVPEIDPNFATELKLKNRQDWMALQLQNPEASKTTLRKLAPATYTWLYRNDREWLNQNSPALQVAVPSVVRVDWHERDQQILAQVQDAVRSLLKADIPERISISRVGKNIGLLALLEKHLDQMPLTKAYLESVVETVEEFQMRRIKWAIKRLDECGEEIMRWKVVRVAALREDCSERVSAFLESELDKAYKKGR

SEQ ID NO: 313 - protein, 226 aa, Anabaena minutissima
MIVDSNLLTQLPSESSSKPKELLMSQFPYMDLTFSLIGETLPFDHGYELFSAIAHFEPKLHTLDTLGIHTIAGIPKDGVINLTQNSRLRIRIPVNQVRLVYPLAGKSLRIGKHTIRLGIPDICLLQPAEKLRSRIVVIRGHEEPETFLVVAQRQLEQLGIQAIVSIPTKANGKPIRRTIKIKRFTVVGFGLEVTKLSDEDSLTLQIHGVGGKQKMGCGLFMPIKER

SEQ ID NO: 314 - protein, 512 aa, Anabaena minutissima
MMKRAANPKIQLNLGDPSMTLLHRAGVAGLWMTLKKLEKIYPTPAQRIGNLTWLLTPRCISLDWEGQDFTVLDWLLKQSFQISHEGLISLTGLDSQNMDIQNQLIIHQGITATFTQHNKFFKSAGQQSKQLIIDGIQLRVDYKKAASYAHQHFAKHLCDEYGQFLEEPIGIRGWLYPGAVVRHYAFKEQTAFEEKAEYALALLFAPVACQYFVLRSHTEPSHTNYVLLVPEVIDLELYAEYLWCLSNLDYKHFHVSSLGDAGLKFLTYETTQMPTSNFLKRCQIISFSTKAWSERQKTRAEIATIELNSSIGYFYKLSCICFPECQVILYKNQHCLLPSLIKGIIANNLAMGWPWWANWISFIKNNKSFKQFTDEYTGINQMIQDSEWEIEAQKLFIQACHEALRKIYAKIYSRTKEGEYAQIERENTRILSQLKRCTNADNFRKFIAEFWGRAGQIAILEEHWMELLPLTTGIGNWKVARDLTFIAMASYPKNKITEVEVKPSQISELNTE

SEQ ID NO: 315 - protein, 324 aa, Anabaena minutissima
MFHLFGNILTNYGTAANNRGENEGNTTTLQKLIWKGEVHSTVSSEAIRWALRYYWQNAGYPVNRRWDENAQPVPDHILQDPNFDDIRFIDDDVLGFMQAEAAKVEAAVESEVEIQNSTQDEDKKLSQGKEKETAKRKRKEKPKGKITTRRGVLEVTRAVSTIPYAGDLTFNAMSGKKGRTSLYSTEVHATRYQYGFALTPNSLKEKSRINAVLDGLISIGEVAGNHARFLYDFSPDSIILRWTHDFSPRLLYCFEEDELRNISTPDLVRRVEAGDIDPKELWIGGAISSTLEDLGANVFPGVKTTVEALKQVITQDLQLSLKSS

SEQ ID NO: 316 - protein, 210 aa, Anabaena minutissima
MTTIVLKVEVPIACFRQSHAREYSETYPVPPPSTVYGMLLSLVGEVDRYKHCGVKLAIALLSEAEKSTVIRTFHRFKTKNIHDSKNNRPDYQELLTNIEFVVWVDVGVDKAQPNLVERLAEALTNPASISRFGGLCLGESRDLVNDVTLLPENYRAESMRWLIRDEYGLLTLPYWVDHVGSRGTRWLCYEVQECQVFQPPELSWTLIQSD

SEQ ID NO: 317 - DNA, 159 bp, Anabaena minutissima
  source 1..159: mol_type = other DNA
gagtaaatagatacgaatatttaagtaaatttgtacaagaataaaaaagtcgtataacaaataaaaaagttatacaatatataaaaaagttgtacaatttatcctgtgggtgcatatgcaagcatctacaggagttttcatggctagaagcaagcaaga

SEQ ID NO: 318 - DNA, 791 bp, Anabaena minutissima
  source 1..791: mol_type = other DNA
taagctttctctgccttagtattcccaaaagtaaaacaatattcagaaaattggaacctgctgtagatttacagaaagataaagacttaagccaagtttgagatgcggtaatatcgttacactgcgatcgcatcttcgtcgcacagcagaactttccaaaataattttgaatctatgaaattactcaaaacctttatcagtaaaggggttacaaaattgttcaaccgttttatttgaggttcttactaaaaaacaagtccaccatagaaagtggacttaaattgttcaaccgttttattttgtgggcaacgagaaattaatcatttgaggagtagaaattgttgaaccgaattatttctctacggctgttgctactggctatagataaagtgaaataaagtgcgatcgcctccctcgaaactcaagctgttgattcagctttgtagtgagaatgcgatcgccactaaatcttgcgagtaaatattcccaaatccttatggggaagtagtttgcaaaattatacaacttttttatttatttttggatggtagcctgagaaaattgtagaactttattttttcgagacttctcagtaaccaacgatataataatgcttgtagtcaggcaaattgtacaactttattatatttctacaaaatatttgtagagtagatgaaatgatttctaggtgtgattatcatatcacatctagaaatgttttttgggcatcgcttacagaaatactgtgtctatctcgccagcagggatttgtcagatggtaatgttacctt

SEQ ID NO: 319 - DNA, 460 bp, Anabaena minutissima
  source 1..460: mol_type = other DNA
gtgctttaacattagatgtcgttaggcgttgagcagttcttttaatttggcaatatccctttcatagggggtgctttaacattagatgtcgttaggcgttgagcagggttacattcacttcgacatatgcaaatcctccaggtgttttaacattagatgtcgttaggcgttgagcagttcattagtgtgcgatttagaggataaagtaaatgtgctttaacattagatgtcattaggcgttgagcagactctagataccgcatctagcagcactcaatttcagtgctttaacattagatgtcgttaggcgttgagcaggtgacagtgacggtggtgtaactaagcgaatgttcgtgctttaacattagatgtcgttaggcgttgagcagcactcctctgctaagttcgctgaccaacgaacacggtgctttaacattagatgtcgttagacgttgaacaa

SEQ ID NO: 320 - protein, 272 aa, Nostoc parmelioides
MARSKQDWTQAKFERYCKEGRGEGSGKDYKPWIKIQDFPSKGRVSRPPGWKTKREHHLFSDNEKRLFYVFEWSDAIVDIREQFPLLDLDLAISIADEMGINYPKDPQSNTPHVLTTDFMLSVKQSKNIVQKARTFKLTKDLGSKSVAEKFELEKRYFAAKGIDWGIITEKEVPKQLAENIEWIHTAYKLEENADINLEELRNIANILKFRLQESDASINKITTALDRDMNIESGTSLYLFRHLLARKEIIMDMLITKISSCPSSKEIQKIIF

SEQ ID NO: 321 - protein, 744 aa, Nostoc parmelioides
MIHDLFVNDLIEWIDESGNNCIERVLWIDEGYVIAFVYDINAKTGFPEARKVSEIREAISDGRALKLKSDPWARIVRDEDLSEKEKELRDRAWQIILFIVTQEPSIYYRDYRGSLVQQVIEKYNAGRTEGELVPITVYKYLRRFWQRGKNKNALLPDYANSGGKGKPKASGDKKRGRPRKYAQVPEIGIGRNVTEEDKRIFRFAIAKFYKNSKENFLTTAYDLMIKEYYAEDFYYDDNGVKKSILIPPDKRPTFTQFKYWYEIEQTDIRKTIISRKGSRKYALENRAITGTSQMETIGPGSRYQIDATIADVYLVSLYNPNWIIGRPVIYVVIDVFSHMITGVYVGLEGPSWTGAMMALANTATDKVKFCQEYGIEIYEDEWPCRHIPDTILGDRGELAGMNVETLIPNLDVRIENAAPYRADWKGLVERQFRTIHGYVKPFVPGYIDTDFRQRGGHDYRLDGRLNINEFTKIVIFLILQHNNHNYLNNYARDEMMIADDVNPIPIELWQWGIANRSGRLRTFPEDIVKLNLMPAEKATITARGIKFKGMYYTCEKASKEFWFEKSRSSLLSKSEKSLNVSYDIRQPNFIYLRSPNGREFEKGWLLESQQRYLDKNFYDIDYLLAYEKLQNQKNQGTRLQAKADLIANIESIVNQAKEETEAVLDDTISNRQKVSGIRQNRADEKNARRKNEAFELAKSESTNADNTKNPINTQSEDSEASKLLQPDHIDLLKRKRQERKSGKE

SEQ ID NO: 322 - protein, 556 aa, Nostoc parmelioides
MERNEEEVVSIPNGQSAVIARYIDQKLPEYNNNPLIQALPPILSVGEFIDKVAREPNFDEQERELEAHYRFHCIERLSRYFDPQNKTLELQKVICTLIMTGYLSRNLLKPEYANRSRQIYNAIGNGGGKNLENYVNLPTSASGLTLIGPSGIGKTTNFKNILELYPQIIFHPDYSVYQIVWLRVDCPKTLKGLCIDTFAGIDKLLGTNLLKKFNPARTSEDYLLAQLAQTAHTHHLGVLVIDEIQNLATAKRNRDEILNFLVKLDNTIGIPVIRVGTNEAISFLQGNLRNARRNTGEGSAMWDRMGNDDEWCYFLEGIWRYQWTKTPVDFSHEIKEVFYDESQGIIDIAIKLYKMVQWRAISIGDQEIITVDLIRQVAKEGLYLVKPMLDAIRLGDREWMIKYKDIAPLDITEYHNRCVSEIDAKDLTEIKRLAKKQQNQQKVSPKLNYVISELLKLEVESGKAKECAEQIVYSHEDPDIPIPSLVNKAYALALQGCQVNESLAKTSTRKAKLKPKYQENDMRRIVENAKKDKKSAYEDLKLAGIIKNPVEDFINI

SEQ ID NO: 323 - protein, 326 aa, Nostoc parmelioides
MKILSIFSFSMLSFFPTLYPDELLYSTLARYHIRSGNKSFKQTDLELFGYSSQQICKITLTNNLNYLVKNLPLRSQQKVENLLQNHTLYPFYATLLMPQEAWLLKNSMSKKFSGSILDFAKVANNSSDDSKKFLKFCPECLEKDTQKYGEPYWHRIHQVPGILVCPIHRVVLHNSCIEVESKGIHYHAASIDNCLLANNVKKLTNKTVETLSTLAHDINWLIHSSFAFQGLAWLRAQYQRYLLDKGLLKTFAGGKFKFDDYGFAQLIYEFYGQESLEAINPRLAQHQGKYFSHCLFGCDVNPAIDRITHILMIKFLANSIEEFFQS

SEQ ID NO: 324 - protein, 636 aa, Nostoc parmelioides
MVSFFPQPYPDEILYSVIARYHIRSGNTSPKITLQELFNSQSTVATVDLPSNLNNLIQNLQFISNYQIEDLIYKHTLYPLYSPFLPVNRSSQVLESMKGDYGGDIHTRAGIMASSITMPKYFRFCPTCWEEDLKNYGEPYWHRIHQTPGVLVCPFHGEVLQDSLVTLHGFNKHEYYAASTENCSITKEPSIFSPDTLNKLLVLAKDFWWLLNSEIPCQEPQWFRKQYTNLMIEQSLATATGRIYQKKLLDHFLLFYGREMLSAVDSMVNHNDSSNWVTSIVRKHRKSFHPLRHLLMMRFLKTSVEEIFKQETEYKPFGEPPWLCLNAAAEHYLQPVITNLVITLCCDTKKPVGTFFCACGMVYCRTGPDETDEDKLRIGKVKAFGQLWEQKLKKLVEVEKLGLRETARRLNVDARTIKRYVSRLKLTTYWQTRTENDSVGLQEVPEIDPNFATELKLKHRQNWMALQVQNPEASKTTLRKLVPATYIWLYRNDREWLNQNSPTLQVAVPSVVRVDWHERDQQILAQVQDAVRSLLNAEIPERISISRVGKTIGLLALLEKHLDQMPLTKAYLESVVETVEGFQMRRIKWAIKLLDECGEEIMRWKVVRVAALREDCSQRVSAFLESELEKAYKKER

SEQ ID NO: 325 - protein, 227 aa, Nostoc parmelioides
MVIDSNLVTQLPSESSSKPRELLMSQLPYMDLTFSLMGETLPFDHGYELFSAIAHFEPKLHTLDTLGIHTIAGIPKDGVINLTQNSRLRIRIPVNQVRLVYPLAGKSLRIGKHTIRLGIPDIYLLQPAEKLRSRIVVIRGYEEPETFLVVAQRQLEQLGIQAIVSIPTKANGQPIRRTIKIKRFTVVGFGLEVINLSDEDSLRLQIHGVGGKQKMGCGLFMPIKEKQ

SEQ ID NO: 326 - protein, 511 aa, Nostoc parmelioides
MKTAANPKIQLNLGDPSMTLLHRAGVAGLWMTLKKLEKIYPTPAQRIGNLTWLLTPRYISLDWEGQDFVVLDWLLKQSFQISDEGLISLTGLDSQNMDIQNQLIIHQGITATFTQHNKFFKSAGQQSKQLIIDGIQLRVDYKKAASYAHQHFAKHLCDEYGQFLEEPIGIRGWLYPGAVVRHYAFKEQTAFEEKAEYALALLFAPVACQYFVLRSHTEPSHPNYVLVVPEVIDLELYAQYLWCLSNLDYKHFHVSTLGDAGLKFLTYETTKMATSNFLNRCKVVCFSTKVWSEQQKTRAEIAIIELNSSVSYLYKLSCICFPNCQFVLYENQYFLVTSLIKGIIANNLVMGFSWWDNWISIIKNDKSFKQFTDEYTGINKMIQDSEWDIEAQKLFIQACHEALRKIYAKIYSRTKEGEYAQIERENTRILSQLKRCTNTDNFRKFIAEFWGRAGQIAILEEHWMELLPLTTGIGNWKVARDLTFIAMASYPKNKITEVEVKPSQISELNTE

SEQ ID NO: 327 - protein, 324 aa, Nostoc parmelioides
MFHLFGNILTNYGTAANNRGENEGNTSTLQKLIWKGEVHSAVSSEAIRWALRYYWQNAGYPVNRSWDENAQPVPDHIWQDPNFDDVRFIDDDVLGFMQAEAAKVEAAVESEVEIQNSTQDEDKKISQGKEKETAKRKRKEKPKGKITTRRGVLEVTRAVSTIPYAGDLTFNAMSGKKGRTSLYSTEVHATRYQYGFALTPNSLKEKSRINAVLDGLISIGEVAGNHARFLYDFSPDSIILRWTHDFSPRLLYCFEEDELRNISTPDLVRRVESGDIDPKELWIGGAIYSTLEDLGANVFPGVKTTVEALKQVITQDLQLSLRSS

SEQ ID NO: 328 - protein, 210 aa, Nostoc parmelioides
MTTIALKVEVPIACFRQSRAREYGETYPVPPPSTVYGMLLSLVGEVDRYKHCGVKLAIALLSEPEKSTVIRTFHRFKTKNIHDSKNNKPDYQELLTNIEFIVWVDAGVDKSKPNLVERLEKALTNPASINRFGGLCLGESRDLVNDVTLLPENYNTESMRWLIRDEYGLLTLPYWVDHVGSRETRWLSYEIQECPVFQPPELSWTSVQSN

SEQ ID NO: 329 - DNA, 171 bp, Nostoc parmelioides
  source 1..171: mol_type = other DNA
aaataaatacgaatatttaagtaaattgtgtacaacactaaaaaagtcgtataacaaataaaaaagttatataatacataaaaaagttgtacaatctatcctgtgggtgcatatgcaagcatctacaggagtttttatggctagaagcaagcaagattggacgcaagccaa

SEQ ID NO: 330 - DNA, 448 bp, Nostoc parmelioides
  source 1..448: mol_type = other DNA
aactttatagatgtggtagtcaagattacctgatttttatgttacggagcaaatattgcgactcttaggggtaaatattgcgatcgccttcaagatattcctcatggccagaagtagacgagaggagacgcaagctaagtttgagctttacctcttcatctgtgatgactgctgggaaaggtttttaagcaaatgattcaaatggaaataaattgcctgaaaagctcatagggcatggtttttataaattgtataacttttttatttgtcaatatgacgaagccttcggaaattatacaactttattttttgaagtttaggtgaatgccaacttaaatacaagctttataatctctaaaattatacaacttttttatatttatacattatcctcctgcacttctggtaatacaaaaatatttactagcttctccgatttttctacttc

SEQ ID NO: 331 - DNA, 682 bp, Nostoc parmelioides
  source 1..682: mol_type = other DNA
gtgctttaacattagatgtcgttaggcgttgagcaggggaaatcccgtgaacaggtgttgcagaattatttggtgctttaacattagatgtcgttaggcgttgagcagacattgatgatatccccaaacaaatatcccaagttgtgctttaacattagatgtcgttaggcgttgagcagtaatctagaacggttgcatcaaacctatgaaccaataacgtgctttaacattagatgtcgttaggcgttgagcagcccaaggtattctccaatgctcaggattttacctttcgtgctttaacattagatgtcgttaggcgttgagcagttggtcaaacgcaaaatacattggacgttgctcaggtgctttaacattagatgtcgttaggcgttgagcagaataacgataaagagatcattcagcgtgcgctcactgtgctttaacattagatgtcgttaggcgttgagcagacatgaggagcagtaataacagtaactccatcctccgtgctttaacattagatgtcgttaggcgttgagcaggagatccttccccagaggaaatacagcgacaattgtgctttaacattagatgtcgttaggcgttgagcagttcaagattgaacatttattttcttaatttagttgtgctttaccattagatgtcgttaggcgttgagtag

SEQ ID NO: 332 - protein, 272 aa, Nostoc carneum
MVRGRREWTQAKYERYIKEGRGRGSGKQYKPWLTIQDVPSKGRSSRTPGWKTNRVHHFFSDHEKRLFYLFEWSDIVTDIREQFPLDDLDLAMSIATDMDIKYPVDTKSGTPYVLTSDFMLTVNRDGKQMQIARTVKPSTELEKKRVNEKLEIERQYYLAKGIEWGIITEKEIPRLLVENVEWVHSAYRLEANPEMNTAQLRELSTILKYKLQEEDTAINTITSALDKEMNISYGTSLYVFKHLIAIKEVIVDLVKIKLSACPSTKVFEKVIF

SEQ ID NO: 333 - protein, 521 aa, Nostoc carneum
MVKEYYKEGIRYDENGVQKSILTPTDKIPTITQFKYWYQLEQDDVTKTLTSRKGAKRVALENRAILGTSKMETIGPGSRYQIDATVADVYLVSKYNRNWIIGRPVIYVIIDVFSRMITGVYVGLEGPSWTGAMMALANVAADKTLFCQEYNINITEDEWPSNQMPDAILGDRGELAGMKVETLIPNLYVRIENAASYRADWKGLVERHFRIIHEHVKPFLPGYVDTDFRQRGARDYRLDGKLDIDQFTEIIVRLIVHHNNKFLKEYERDEAMVADDIPPIPRELWRWGITNRSGRLRTFSEDIVKLNLMPTEKATITAKGIKMRGKEMYYTCDSAEKGQWFEKARSNLLSKSDKSLIVSYDTRNPNFIYLPSSDGRDFEKCFLIDSEGRYANKNFYDIEYLLAYEELQRQKSQGQQLQEKVDLIADIESIVDKAEQMTDAAQEPNLSKTKKVSGIRENRAFEKAKRRDSEGFELAITENQSSFQVIESKSETSEQPESLQPNHLNLLKKKRQERKRGQDRG

SEQ ID NO: 334 - protein, 556 aa, Nostoc carneum
MDRIEGELVKIPNGELAVIARYIDQKLPEYNVNPLIQALPHILSAEEFIDQVTRTPDFNEREKELETHYRFHCIERLSRYFDPQNKTVELQKVICALIMTGYLARNILKPEYASRSRQIYNAIKHGGGKNLENYVNLPTSASGLTLIGPSGMGKSTNFQNILNLYPQVILHPDYSVYQIVWLKVDCPHAGSLKGLCTDIFLAVDRLLGTNYFKKFGSSRNSEDYMLAQVAQIAHTHHLGVLVIDEMQNLVTARRSSSDMLNFLVKMDNTVGIPVIRVGTNEAFPILQGNFRNARRGTGEGSVIWDRMVNDDEWYFFMEGMWEYQWTKTFVPFSDEINEVFYDMCQGIIDIAVKLYKMVQWRAISIGDKEIITVDLIRQAAKDGLYLVKPMLDAIRSGDKEWMIKYKDIAPLDTTEYQNKCLSELDYKDLKEIRRLARKQQNQQQVSPKLNYVILELLNLEIEPAKAKEYAEKTVSSDEDADIPSLVKKAYALALQGGQVNENLAKTSTKKVKSKPKYKENDIRRIVENAKKEKKSAYEDLKSAGIIKNPIEDFINK

SEQ ID NO: 335 - protein, 315 aa, Nostoc carneum
MLSFFPTPYPDELLYSALARYHIRSGNKTFKQTDLELFGYSSQQLCKVTLTNNLNYLVKNLSLFSQLTVSDLLQNYTLYPFYSTFLIPQQAWQLQDSMRNKLSGSILEVAKVANHPTENSTKFLKFCPVCLKKDTQEYGEPYWHRIHQIPGILVCPTHRIILHDSSVAVDSKGIHYHAASLENCLCNQNQVKYTDSTVEKLLILAQDIWDTSNINISFKGLAWLRNQYQSYLINQKFMNILPGGKFRFNQKSFSNSIRDCYGQEVLEIINPNLIKNPDKYFSSYLLGCDLNPVIDRITHILIIKFLAKSVKTFFT

SEQ ID NO: 336 - protein, 632 aa, Nostoc carneum
MLGFFPSPYPDEILYSILARYHIRSGNTSPKITLRELFNSENTIATVDLPSNLNSLMQNIKLVSNYQVEDFIYKHTLFPFYNVFLPPKRASQVIDSMKAEFGGDIHTRAGIMASSIKMLRSLRFCPQCLQEDLQKYGEAYWHRIHQIPGVLVCPFHCITVQDSIISTQGLNRHEYYAASSENCPISSIETYSEETLNKLLLLAQDSWYLINSKFVSRELEWFQKKYIALLISKGFSTASGRVNQKKLLDNFLFFYGHEILTAVNSMVSYEKSQNWLFSIFRKHRKSFHPIRHLLTIRFLSNSLDEFFSNHYEYKPFGDAPWLCLNAATEHYLQAVVNHLVISHCLDNKKPLGTFSCSCGMVYCRTGPDETEEDKLRIGKVIKFGSVWEQKLKELVEIQKLGLRKTARQLNVDPRTVIRYTSLLGLKTHWKSIKEAKPLDKEVLELNPVNYFNSINIKYREAWKDLQYQYPEASKTALRRLAKGTYAWLYRHDKEWLHQNSPDFKVSVPSLGKVDWVKRDKQVLEEVKKAVLSLLSAEKPVRITIGRIGRTINLLALLEKHLSEMPLTKAYLDSVIETVEDFQIRRIQWAIQQLDNHGEEILAWKVIRVAGLGENCSEIVQAYLEKELYIRMY

SEQ ID NO: 337 - protein, 222 aa, Nostoc carneum
MGDHFHLSTQNHVKDVLNPQLIYVDLSFRVIGQTLPIDHGYGLYAALTHLQDKLHSLDDLSIQTIPGIPDGKDSLNLNNHSRLRIRLPVEKIPLVYPFAGKSLTIGRHKIRLEIPQMYLLQAVEKLRSRIVVIKGYEEPDAFLAAAQRQLERLGIQGIASIPTKADGKPKRRSIKIKKFTVVGFGLEVTNLSNEDSITLQKYGVGGKQKMGCGVFVPVNEKR

SEQ ID NO: 338 - protein, 510 aa, Nostoc carneum
MINTTANSKIQLNLGESSTTLLHRAGIAGFWMTLKQLEKIYPNPDQRTGNLTWVLTPYSISLNWEGQDFAALDWLLKQSFQISDEGLISLIGSNLQAMDIERQIIIHQGITGTFLQHNQFFKSSGKKLKSIIVDSKKFVTEYKSAISYAHQHFAIKLCDESGQFLQEPIGIVGWLYPGAVVRHYAFKEQTQFEEKPEYALALLFAPVACHYFILRSHTKPQSTNYILLVPEVNNLELYAQYCWNLSNLSYRDFNVSSLREAGLKFLTTQTAVQVNQNCVKRCQVFSFGTLIWSEQQKVRTEIATLKLTEKVSFYYKLSRSCFPNYRIVYYGNQHFILTSLVQGIIANNLGLGLPWWNDFGNKLTSSNLFNQIADERQGIYTMIQEFEWDIESQKLFIKACHEALKVTYAKIYSRTKENEYAQIERENTKIISQLGRCTNAENFRKFIAEFWGKAGQLSILQKHWEELLPITTGMMNWKMARDLTFIAIASYPKTQNIKPESSEISQTSSE

SEQ ID NO: 339 - protein, 331 aa, Nostoc carneum
MSHLFGNILTIYGTAANNRGENEGNITTLQKINWKGEVHTTVSAEAIRWALRYYWQNNGYEVNRRWDENAQPLADHILQDLNFNNVRFIDDDVLGFMQTEAARVEAGDQSGGEVQEASAGEIQNVSQDEEVTSSKGKRKKTSQRKGRERPQGRVAAKRGVLEVTRAVSLIPYEGNITFNAVSGKKGRTSLYGTEVHATRYQYGFALTPNSLQDKSRSNAVLNGLISIGEVGGNHARFLYDFSPDSIILRWTHDFSPRFLYCFEQDEWGNISVPDLVRRVEAEDIDPKELWIGGAIARDLGNLGANVFPGVKKVVEELLKVITRDLQLLPRS

SEQ ID NO: 340 - protein, 210 aa, Nostoc carneum
MTTIALKVEVPIACFRQSRAREYVETYPVPPPSTVYGMLLSLVGEVDRYKHCGVKLAIALISEPAKSTVIRTFHRLKTKNIHDPKNNKPDYQEVLTNIEFVVWVDAGVDKAKPNLVQRLEEAFTNPGSINRFGGLCLGESRDLVNDITLLPKNYYAESMRWLIRDEYGLLTLPYWVNHVGSRGTRWLSYEIQECQVLQPPELSWTSVQSD

SEQ ID NO: 341 - DNA, 237 bp, Nostoc carneum
  source 1..237: mol_type = other DNA
ttagatgtcgatcagcccaggaacctggcaaaaagcgttacggtggaatagtataaaattatactttaattcttgtgtagaggaataattcggttgaacaataaataattcgattcaacaattaataaaacgattgaacaataacctctgatggagtactattgtactaagtaaaggtgcgatcgcttccagaggttatttttatggtgaggggcagaagggaatggactcaagcta

SEQ ID NO: 342 - DNA, 633 bp, Nostoc carneum
  source 1..633: mol_type = other DNA
attactgaaacagtgcgatcgcaatgtcaagattttgatctgcctaccatttattctcaaagacgacagactgaactaaatagcaagcttgtagaggcgttacagattttatcgctctttgacagctagatgaaagataagttcaagataactgtaactgacgattgcagttgcaaaagaatgcgatcgcataacatttctcacagcaggacttctaaacttaatcttcaacttatttaagtatcccaaatctttatcaggaaagggtttacaaaattgttcaaccgttttattcgatgtttttgctgacaagtaagtatactacagagagtgtgcttaaattgttcaaccgttttattatgtaaatcacgatagattaagcatttgaggctcaaatattgttcaatcaaattatttgtctacacttgttgtggaaacataataaagttatacaatttctcctatgggtgagtatattccacctgtaggaaattgtctttatggacaactcattctcgatggtcacggaatgactatcttagcacctaacgcaccgccggatggtgttgtctctaaccccccaataccctcatagccgtaacatacgctacttaacggctccccttgcttgcc

SEQ ID NO: 343 - DNA, 422 bp, Nostoc carneum
  source 1..422: mol_type = other DNA
acaattttctttgtgctatgaatagctatgaatttttgcaactggactaatcttcagtgatagatgcttgtaaaattgaaatggagcttaggcaagtcaacaagtttggcaatcgccgtgcttcaacattagatgccattaggcgttgagcagactaattcatcaggcccaagttgggcctagtaatttgtgtttcagcataggatgcctttaggcgttgagtagcaagcacaagcaatatttctcattgcttataatattcagcttgaaaagcatatattattaaccgatagtaaacaaagtaactcagtaataataaattaaatagcatcagaattaaggaaatatataagcgatcgcaaaaaaaattctagatacaaagaaaaacgctacatgacttgtgatcaccctgaggggcgatc

SEQ ID NO: 344 - protein, 272 aa, Calothrix membranacea
MARTKQEWTQAKFERYMKEGRGQGSGKNYQPWIKIQDFPSKGRVSRPPGWKTNREHHLFSDHEKRLFYLFEWSDSIIDIREQFPLLDLDLAINIATEMGIDYPKDPNNDTPYVLTTDFMLSVKQGNQIVEKARTFKLVKDLGTKSVAEKFELEKRYYAAKGIDWGIITEKEIPMFLVKNVEWIHSSYKLEAAAEIKVDELHNIANILKSKLQESDSTINKITNSLDKEMNLEVGTSLYIFKHLLANKKIIMDMQTRTISSSISSREIKKIIF

SEQ ID NO: 345 - protein, 742 aa, Calothrix membranacea
MNKNLFVNDLIEWVDELGNNFVERILWIDEGYVIAFTIDINVKTGFPVSKRVSDIQAAISEGHALKLKTDPWARIVRDEDLSAKEKEIRDKYWDIISPIVIQEPSIYYRDKRGSLIKQVVEKYNHNRSEGKIIERSVYQIIRRYWQRGKDKNSLLPDYANSGGKGKVRASGEKKRGRPRKYAHEPEIGIGINITDEDKKIFRLAVTKFYHNQKENFLTTAYDLMIKNYYSEETIYDDNGVKKHILIPPDKRPTLTQFKYWYDVEQGDIRKKIISRRGAKKYALEHRAITGNSTMETIGPGSRYQIDATIADVYLVSAYNRNWIVGRPVIYVVIDVFSRMITGVYVGFEGPSWIGAMMALANAASNKVAFCKEYGIEITEDEWACHHIPDAILGDRGELAGMKVETLIPNLGIRIENAAPYRADWKGLVERHFGIFHGHIKPFVPGYIDKDFRERGARDYRLDSKLDIEQFTEIIIKIILYHNNENYLDNYERDEAMIADDILPIPRELWQWGIANRSGRLRTIPEDIVKLNLMPTENATITERGIKFKGMYYTCEKAKNEFWFEKARSNSLSKLEKKLEISYDIRKPDYIYLRSPDGRDFEKCFLLESESKYLNKNLHEIEYLFAFEELQKQKNKGLKQQQKVDLITEIESVVNKAKKMTEETKDDKLSNRKRTAGIRDNRSVEKSKRREIEGFELEKSDNKNTSNTVDTESQKVEQPQSLQPNYLDILRQKREERKREQDR

SEQ ID NO: 346 - protein, 596 aa, Calothrix membranacea
MIFFDRSERNESVNKIDDWRWVDIPNGESAAVAKYNDHKLPEYNNHPLIQALPPILSGEEFIEKAIILPSYAPEERELAAHRRFHCVERLSRYFQPLNKTVNLQQVMCALLMQGYIARNISKPEYARRSRQIYEAIKAGDGKNLDVYVNVPTSTSASGLTLIGPSGMGKSTNFINILNLYPQVILHPEYSTYQIVWLKVDCPHAGSLKGLCTDIFVGIDRLLGTNYFKKFGASRNSEDYMLAQVAQIAHTHHLGVLVIDEMQNLVTARRSCSDMLNFLVKMDNIIGVPVIRIGTNEAFPILQGNFRNARRGTGEGSVIWDRMRNDDEWYFFMETMWEYQWTKISTDFSDELNDVFYDESQGIIDIAIKLYKMVQWRAISLSGKEEINVIKLYKMVQWRAISLSGKEEINVNLIKQSAKDGLFLVKPMLNAIRSGDKEWMIKYKDIAPIDTTEYYNNCLSNLETKDLKEISRLAKKQQTENGHLSATQRHIILKLLELDVEPQLAKECAAQVINSGEEDADIPILVKQAYALALGGRVQGTTVTKVKTRILKAKPKYQVNDIRQIAEKAKKNQTSAYEGLKSIGIIKDPVQNFITIT

SEQ ID NO: 347 - protein, 315 aa, Calothrix membranacea
MLSFFPNLYPDELLYSALARYHIRSGNKTFKQTDLELFSYSSQQLCKVTLTNNLNYLIKNLSLFSQLTVSDLLQNHTLYPFYSTFLIPQQAWQLQDSMKNKLSGSILEVAKVANYPTENLTKFLKFCPVCLEKDTQEYGEPYWHRIHQIPGILVCPTHRIILHDSSVAVDSKGIHYHAASPENCLCNQNQVKYTDSTVEKLLILAQDIWDTSNINISFKGLAWLRNQYQSYLTNQKFMNLLPGGKFRFKQKSFSNSIRDCYGQEFLEIINPNLIKNPDKYFSSYLLGCDLNPVIDRITHILIIKFLANSVERFFT

SEQ ID NO: 348 - protein, 636 aa, Calothrix membranacea
MVSFFPQPYPDELLYNVIARYHIRSGNTSPKITLQELFNSQSTIATVDLPSNLNNLIQNIQFISNYKVDDLIYKHTLYPLYSPFLPVNRSSQVLESMKGDYGGDIHTRAGIMASSITMPKYFQFCPTCWEEDLKNYGEPYWHRIHQIPGVLVCPFHGEVLQDSLAPLHGFNKHEYYAASTDNCSITKEPSIFSSDTLKKLLVLAKDFWWLLNSEIPCQEPQWFRKQYTNLMIEQGFATATGRIYQKKLLDNFLFFYGREMLSAVDSIVNHNDSNNWVTSIVRKHRKSFHPLRHLLMMRFLKTSVEEFFQQDTEYKPFGEPPWLCLNAAAEHYLQPVITNLVITLCCDTKKPVGTFSCSCGMVYCRTGPDETDDDKVRIGKVKTFGQLWEQKLKELVEVEKLGLRETARRLNVDARTIKRYVSCLRLTTYWQTRKENDSVGLQELPEIDPYFATELKLKHRQNWMVLQVQNPEASKTTLRKLAPATYIWLYRNDREWLNQNSPALQVAVPSVVRVDWHERDQQILTQVQDAVRSLLNANEPERICISRVGKTIGLLALLEKHLDQMPLTKAYLKSVVETVEEFQMRRIKWAIKLLDKCGEEIMRWKVVRVAALREDCSQRVNAFLDSELEKAYKKER

SEQ ID NO: 349 - protein, 222 aa, Calothrix membranacea
MSDNFHVSTQNHATEVLNPQLMYVDLSFRVIGQTLPIDHGYGLYAALTHLQDKLHSLDDLSIQTIPGIPDGNDSLHLNNHSRLRIRLPVDKIPLVYPFAGKSLTIGRHKIRLEIPQMYLLQAVEKLRSRIVVIKGYEEPDAFLAAAQRQLERLGIKGIASIPTKADGKPERRSIKIKKFTVVGFGLEVTNLSDEDSITLQKYGVGGKQKMGCGVFVPVNEKR

SEQ ID NO: 350 - protein, 510 aa, Calothrix membranacea
MINTTANSKIQLNLGDSSTTLLHRAGIAGFWMTLKQLEKIYPNPAQRTGNLTWVLTPHSISLNWEGQDFAALDWLLKQSFQISDEGLISLTGLNLYAMDIERQIIIHQGITGTFLQHNKFFKSSNKKLKPLIVDGKKFVTEYKSAISYAHQHFAIQLCDESGQFLQEPIGIVGWLYPGAVVRHYAFKEQTQFEEKPEYALALLFAPVACHYFILRSHTKPQSTKYILVVPEVNNLELYAQHYWTLSNLSYRDFHVSSLRDAGLKLLTNQATIQIKQNCVKRCQVFSFGKLIWSGKQKVRTETATLELTEKVSFYYKLSRSCFPNYRIVYYGNQHFLLTSLFQGIIANNLGLGLPWWNDFGNILTSSNLFNQIADENQGIYTMIQESEWDIKSQKLFIKACHEALKVTYAKIYSRAKENEYAQIERENTKIISQLGRCTNAENFRKFIAEFWGKAGQLSILQEHWEELLPITTGMMNWKMARDLTFIAIASYPKTKNIKPESSEISQTSSE

SEQ ID NO: 351 - protein, 332 aa, Calothrix membranacea
MSHLFGNILTIYGTAANNRGENEGNITTLQKINWKGEVHTTVSAEAIRWALRYYWQNNGHEVNRRWDENAQPLADHILQDLNFNNVRFIDDDVLGFMQTEAAKVEAGDQSGGEVQEASAGEIQNVSQDEEVTSSKGKRKKTSQRKGRERPQGRVTAKRGVLEVTRAVSLIPYEGNITFNAVSGKKGRTSLYGTEVHATRYQYGFALTPNSLQDKSRINAVLNGLISIGEVGGNHARFLYDFSPDSIILRWTHDFSPRFLYCFEQDEWGNISVPDLLRRVEAEDIDPKELWIGGAIARDLGNLGANVFPGVKKVVEELLKVMTRDLQLPPRSS

SEQ ID NO: 352 - protein, 207 aa, Calothrix membranacea
MALKVEVPIACFRQSHAREYVETYPVPPPSTVYGMLLSLLGEVDRYKHCGVKLAIALISEPAKSTVIRTFHRLKTKNIHNPKNNKPDYQELLTNIEFVVWVDAGLDKAKPNLVQRLEEAFTNPGSINRFGGLCLGESRDLVNDITLLPKNYYAESMRWLIRDEYGLLTLPYWVDHVGSRGTRWLSYEIQECQVLQPPELSWTLVQSD

SEQ ID NO: 353 - DNA, 211 bp, Calothrix membranacea
  source 1..211: mol_type = other DNA
cgcggcttagatgtcgatcagcccaggaacctagcaaaatcagtaactgttgagtagtatttatactgacaatctcagtaattgtcgaaacataataaagttgtacaataaataataaagttgtacaacacataataaagttatacaatttttcctatgggtgagtatcattccatctgtaggagattgtctttatggctagaaccaagca

SEQ ID NO: 354 - DNA, 686 bp, Calothrix membranacea
  source 1..686: mol_type = other DNA
aattgctcattggggatagatattgcgatcgccttcaagagatttcttatggctagaggaatgcgagagtagacgcaagctcagtttgagctttaactcttgcagttctctagtaattttcctaagtgtgttatgactgcttagggaggttttttcaacaaatgatcaactgaaaatatattgcctgaaaagcctatatggtaagcttttgataaattgtataacttttttatttatcaatatgaagaatacttcggaaaatgtacaactttattttttgaggttaagataagtagtaatgctaatataagagttgtagatgtttaaattgtagaactttattatatttctacagtaattgcaacaataaaaaagttggaaaataaatacttataaccgtactaatgggattaaacaaaaggcgatcgcaatctttaaagagagggcgatcgctttttttgtattttatactaataccaattgaaaaaatgatactaacttgaaaaaagaatgtgacacatacacaaacccaaagaattttgaattttgaattggtatgatttattgttaggaaaaatttaaagagtaaaggtttttatggtttacctttaccctttttaattaagctaaagtttctggttctacacccaaagcccttaatctttcttctagtattcgcgctcttg

SEQ ID NO: 355 - DNA, 404 bp, Calothrix membranacea
  source 1..404: mol_type = other DNA
gtgcttcaacattagatgccgttaggcgttgagcagaggataaatacaataattgggtgcagcgggtaaaagatgtgcttcaacattagatgccgttaggcgttgagcagattctggcattctccttaagtacaggcatggttctttcgtgcttcaacattagatgccgttaggcgttgagcagagagcctggggtgctatctgagcctaatggcagttgtgcttcaacattagatgccgttaggcgttgagcagcggattgcaatagctaacaaaggggaagaattagaagtgcttcaacattagatgccgttaggcgttgagcagtagctccatgttccttgtaaagtcctaagcgagaatctgttcttcaatattattagatgctattaggcgttgagcaa

SEQ ID NO: 356 - protein, 272 aa, Nostoc sp.
  source 1..272: note = 'Peltigera membranacea cyanobiont'
MVRGRGEWTQAKFERYRKEGRGRGSGKDYKPWITIQDFPSKGRSSRTPGWKSNRVHHFLSDQEKRLFYLFEWSDVVTDTREQFPLDDLDLAMSIATEMGIKYPVDLQSGTPYVLTTDFMLTVNQNGKQVQIARTVKQSTELEKKRVIEKLELERRYYLAKSIDWGIVTENEIPRLLAENVEWIHSAYNLEANSEMDIPQLHELGTILKSKLQEHDTAINRVTTALDKEMNIKSGTSLYMFKHLIAAKKIIINMLETKISACPSSKVIEKIIF

SEQ ID NO: 357 - protein, 743 aa, Nostoc sp.
  source 1..743: note = 'Peltigera membranacea cyanobiont'
MHEDLFINDLIEWESDGNSQLIERIIWIDEGYVIAFVLDINSKKGLPEPKKVSEILEAMSEGLAFKQKQDPWARIIREENLTDRDKEYRDKAWEIISSLVVQEPSIYYRNIRGSLVRQVIKSYNEGREKDKLVERTVYGYMRRFWQRGKTKNALIPDFINSSGKGKIRGDSNKKRGRPKKYSYDPEIGEGVNVTEEDRRIFRIAISRFYNNPKENYFTTAYELMVKEFYKEGVRYDENGVRKSILTPTEKIPTITQFKYWYQIEQYDVTKTLISRIGAKKFALENRAILGTSKMETIGPGSRYQIDATVGDVYLVSKYNRNWIIGRPVIYVIIDVFSRMITGFYIGLEGPSWIGAMMALTNVAADKVMLCQEYNIDIAEEQWSCNQMPDAILGDRGELAGMAVEPLIPNLYVRIENAASYRADWKGLVERHFRTIHEYVKPFLPGYVDTDFRQRGARDYRLDSKLDIDQFAEIIIRLIIFHNNKPLNEYERDEAMIADDVPPIPRELWEWGIANRSGRLRSFPEDIVKLNLMPTEKATITAKGIKLRGKDMYYSCDQAEKEQWFEKARSNMLSKSEKSLIVSYDIRNPNFIYLPLEDGRNFEKCFLIDPEGRYINKNFYDIEYMLAYEELQQQKTQGKTLQEKVDLIADIEHIVSKAENMTEAAQDEPLSKSKKVAGIRENRAFEKAKRRENEGFELAKTETPTSTEAVETNNESLKPPKSLQPNHLDILKQKRLERKRGRKE

SEQ ID NO: 358 - protein, 566 aa, Nostoc sp.
  source 1..566: note = 'Peltigera membranacea cyanobiont'
MFLSRNDWSVNVDGKNEREWVEIPNGDWAAIAKYSDHKLPEYNINPLVQALPPILSRDEFVERVTEVPDYDSVETELEPQYRFHCIERLSRYFDPQNKTIELQKVIAVLIMQGYIARNILKPEYTRRSRQIYDAIKDGGGKTLENYVYVPTSASGLTLIGPSGMGKSTNLLNILSLYPQVILHPEYTTFQIVWLKVDCPRSLKGLCTDIFLAVDRLLGTSYFKKFGSRGNSEDYMLAQVAQIAHTHHLGVLVIDEMQNLVNARRNRDDLLNFLVKMDNTIGVPVIRVGTNEAFPILQGNFRNARRGTGQGSVIWERMLQDDDWDFFLTGIWEYQWTKTPVDFSDEINEAFYYECQGIIDIAIKLYKMIQWRAISLGGDEKITVDLIHQSAKDGLYLVKPMLDAIRSGDQDWMIKYKDIAPINAIEYKNKCLSELESRDLEEVRRLARKQQNRGNQSVKLRHIIVELVKLDVEPSVAKECAEKVLEINEDNADIPSLLKEAYIYALQGEPVKKGTAKTNIRKTKPKYQSNDIRQIVENAKNKKNPAYQDLKAADIIKNPLQDFINIE

SEQ ID NO: 359 - protein, 315 aa, Nostoc sp.
  source 1..315: note = 'Peltigera membranacea cyanobiont'
MLSFFPQLYPDELLYSGLARYHIRSGNTSFRQTEIELFGYYSQQICRVILPSNLNYLVNNLPLRSKQTVENIIQNHSLYPFYATFLIPQEAWVVRESMKKKLNGSILEMAKIAFNSTDRAKKFLKFCPICMEEDTQKFGEGYWHRFHQIPGVMVCSVHNSALYDSSVIVETRNTHYHAASPDNCILNTNTRNYTEGTLRNLIVLAREVEWLISNNMDFKGLAWLRSQYKHYLVNKKLITLFPGRKFIFKEKDFSKSIFNFYGQNFFETINQNCIKNPDKYFSNCLLACDINPVIDRIIHILIINFLANSLENFFR

SEQ ID NO: 360 - protein, 633 aa, Nostoc sp.
  source 1..633: note = 'Peltigera membranacea cyanobiont'
MLGFFPAPYPDEILYSILARYHIRSGNTSPKITLRELFNSQDVIATVDLPSNLNSLIENLQFISNYQVEDLIYKYTLYPFYSVFLPPKRASQVMESMKADFGGDIHTRTGIMASSLKMQRYLRFCPKCLEEDLQNYGESYWHRLHQTPGVLVCPVHGVTLQDSTIPIQGFNRHEYHAASQENCPVVPIQQAYSQETLKKLRLLAQDISWLITSNLFSRELEWFQRKYIALLTEKDFATATGRVNQKRLLDNFLFFYGAEVLEAVNSMVNYENEQNWLFSIVRKHRKSFHPIRHLLIIRFLTNSIEEFFNTDYQYKPFGEGPWLCLNAAVDHYLKPVITNLVVTHCLDNKKPLGTFSCSCGMVYCRTGPDETDEDKQRIGKVKTYGQFWEQKLKELVEIQKLGLRETAKQLKVDSRTVKRYTAILKLKTFWKSSEENQLVDSQEVLDSNLNLASDDKIKYREVWNALQQQYPEASKTTLRGLGKGTYIWLYRNDKEWLNKNSPSLKVPLPCVGKVDWTERDKQVLEKVKTAVRTLLSAEKPARITICRIGKSISLLALLEKHLAEMPLTKVYLESVTETVEDFQIRRIKWAIKRLDDCGEEIQPWKVIRLAALRENCSERVQAALESELYKQPN

SEQ ID NO: 361 - protein, 234 aa, Nostoc sp.
  source 1..234: note = 'Peltigera membranacea cyanobiont'
MSSYFSLPTQTPITETLTQTYPKETLTPKLPWVELRFSIIGQTIPVDHGYGLYSAIAHFQSQVHDIDTLGIHTIAGIPSEDGQIHLTDNSRLHIRLPVDKISLIYPLAGKSLKIGKHTIRLGIPEIYLLEPAERLRSRIVIIQGYQKPESFLAAAQRQLEQLGIQGKAFITKNTDGSPKRRSIKIKRFTVVGFGLEIINLSNEDSLTLLRYGIGGKRKMGCGVFVPVKIKGNAS

SEQ ID NO: 362 - protein, 511 aa, Nostoc sp.
  source 1..511: note = 'Peltigera membranacea cyanobiont'
MSVVASVVNPKIQLNLGDPSITWIHRVGIAGLWMTLKQLEKLYPIPAERPGNLTWLLTPRSISLEWQGQDFVVLDWLLKQSFQINEEGLISLTGLNTHSINIETQINIHLGITGTFLQHNQVFKFDGGKSWSLIVDGIEIDVEYKKAVSYAHQHFAKQLCDKQGQLLGQSIGVAGWLYPGSVVRHVAFTKETRFEEKPQLAFALLYALVACHYFVLRSHTKLEQTQYALVIPEVVDLEIYAQEYWNLGNLDYKDFHVSSLGDAALKFLTYETIVELAIPDQEKRCQVMLFGTVIWSKQQKTRIEIAVVEATEIMDFIYKLSRISFPEYQIIEYKNKNFIISNMFRGTIADNLVKGFPWWANLYTIFKNKNLFKFITNDGVYKMIQNAEWNLESQKLFIKACHEALKKIYAKIYGRTNEGQYAQIERENIRILSQLGRCTNAENFRKFIAEFWGRAGQLSILEKHWEELLPLTSGIMDWKVARDLTFIALASYPKSNMVEKQILEISDSNSE

SEQ ID NO: 363 - protein, 324 aa, Nostoc sp.
  source 1..324: note = 'Peltigera membranacea cyanobiont'
MFHLFGNILTSYGTAANNRGENEGNITPLQKLNWKGEVHTIVSSEAIRWALRYYWQNVGYPVNRRWDENAQPVADHLWQDLNFDDIRFIDDDVLGFMQAEAAKVEASDESGGDAEEASQDENKKSSKGKDKQTSPRKGKQKPKGKITARRGVLEVTRAVSMIPFMGDITFNAVSGVKRRNSLYATEIHATRYQYGFALTPDSLKDKSRIHAVLDGLISIGEVAGNHARFLYDFSPESIVLRWTHDFSPRFLYCFEQDELGNMSISNLVRQVEVGDIDPKELWIGGLISHGLEDLGANVFPGVKSAVKALKQVIAEDLQLSSGSD

SEQ ID NO: 364 - protein, 208 aa, Nostoc sp.
  source 1..208: note = 'Peltigera membranacea cyanobiont'
MTTVALKVEVPIACFRQSRAREYAETYPVPPPSTVYGMLLSLIGETDRYKHCGTQLAIALLSKPEKSIVIRTFRRFKTKDIHHPKNAKPDYQELLTNVEFVVWVKTDKAKPTLAELLQQAFANPASINRFGGLCLGESRDLVNTVTLLPEKYHSESLWWLVTDEDGSLTLPYWVDHVGSKRTRWQCYELQESQVWQPPDLSWTTIQTS

SEQ ID NO: 365 - DNA, 238 bp, Nostoc sp.
  source 1..238: mol_type = other DNA; note = 'Peltigera membranacea cyanobiont'
atattgccgcccgtcgcggtttggatgtcgatcagccccggaatttggccaagtctgtaacggtggaatagtctattaatagaggtagtagcgtttatgtggaggaataattcggttgaacaattaataattcggctaaacaattaataattcggttaaacaataaccctttacagagtacgcttgtattaagaagatatgcgatcgctctcaggggttatttttatggttagaggca

SEQ ID NO: 366 - DNA, 686 bp, Nostoc sp.
  source 1..686: mol_type = other DNA; note = 'Peltigera membranacea cyanobiont'
actcgcaagaacactgaagcgatcgctagtcatatccacaaaacaaatacccaagtgacgtaaaattaaactccatctggcacttgccaaatcgttaacatccatgcttcagctataggtaaagtgaaatagagggcgatcgcatcccaagtgcaagcatgaatcaacatcttgagtttgccagatatgcgatcgccactaaatcttggagcaaatattcccaaatccttacagggaagtcgtttgcaaaattgtacaacttttttatttgtttttggatggtagaatgatgaaattgtacaactttattttttcaacagtgctgaatagctaacgatagaataatacttgtaggtgcttaaattgtacaacttttttagatttctacattttttgtaaacaaataataaaattgtacaattttattatttgtttacagcaagataatatgccaatacccgaactctataaactcgggttccaagatgataaatacggtgctaacatcccattcaaacatcaacagatagtggaaatggtgccgttatttgtacacccagaatttcagacacaagaaacctatcaatcatttcggtctgattttaagtactttgtctgtttgttaataagagatgcgggtaatggatagcctcaacgcgggaagggggaattcaaagcctctcgac

SEQ ID NO: 367 - DNA, 181 bp, Nostoc sp.
  source 1..181: mol_type = other DNA; note = 'Peltigera membranacea cyanobiont'
gttctttaacattagatgtcgtcagacgttgagcagaaacatggaatccattggttggctgttctcgcatcagttctttaacattagatgtcgtcagacgttgagcagaaatcgactccagcgtaagagcgctccctacgtaagttctttaatattagatgtcgtcagacgttaagcaaga

SEQ ID NO: 368 - protein, 272 aa, Calothrix sp.
MARTKQGWTAAKFERYMKEGRGQGCGRDYQPWFKIQDFPSKSRVSRPPGWKTNREHHLFSDYEKRLFYLFEWSDSIIDIREQFPLLDLDLAMNIATEMGIEYPKEKESNTPHVFTTGFMLSVKQGKQTVQKARTFKLAKDLGTKLVAEELELERRYYAAQRIDWGIITEKDIPIILAENVEWVHSSYKLEATAKINVNDLISIAKILKSKLQENDSNINHITQALDIDMNLEVGTNLYLFRHLIANKQIIMDMETSKISTVMSASKIQRIIF

SEQ ID NO: 369 - protein, 742 aa, Calothrix sp.
MSNYLCVNDLIEWLDESGNSFVERVLWIDEGYVMAFTIDINAKTGFPVSKSIFNIQESINEGRALKLKSDPWAKIVRDGDLSHKEKEIRDKYWDIISSIVIQEPLVYYREKRGYLIKQVIEQYNSARSEGKLIEKTVYKLIRRYWQRGKEKNSLLPDYSNSGGKGKPKASGEKKRGRPRKYSHEPEIGIGINITEEDKKIFRLAITKFYHNRKENFLITAYELMIKNYYSEEIIYSEDGVKKHLLIPPDKRPTLTQFKYWYEVEQGDIRKKIISRKGAKKYALEHRAIIGNSTMETNGPGSRYQIDATIADVYLVSAYNRNWIIGRPVIYVVIDVFSRMITGVYVGLEGPSWIGAMMALANAAGNKVVFCREYGIKIVEDEWPCHHIPDAILGDRGELAGMKVETLIPNLGIRIENAAPYRADWKGLVERHFRTIHGHVKPFVPGYIDKDFRERGARDYRLDSKLDIEQFTEIIIKIILYHNNQHYLDEYKRDETMIADNVSLIPRELWKWGIANRSGKLRTFSEDIVKLNLMPTANATITERGIKFKGMYYTCEKAKQEFWFEKARSGSLSRLDKKLEVSYDIRKPDYIYLRSPDGRNFEKCFLLKLEERYCQKNLHDIEYLLAYDELQRQKNQGIEQQNKVDLITDIESVVSRAKKMTEGTKDDKLSNRKQVADIRENRSTEKNQRRESEGFELEKAEIENSSNTVDIDNKNLEQPQSLKPNHLDMLRQNRQERKYGQNK

SEQ ID NO: 370 - protein, 560 aa, Calothrix sp.
MDKTNDWKWVKIPDGEYAALATYNDHKLAEYNNPLIQALPPILSGEEFIRKVAVYPSYAPEERELDAHHRFHCVERLSRFFEPLNKTINLQQVVCALLMQGYLARNIYKPEYARRSRQIYEAIKVGGGKNLEHYVNIPTSASGLTLIGPSGMGKSTNFIHILKLYPQVILHPEYSTYQIVWLKVDCPHAGSLKGLCTDIFLAVDKLLGTNYFNKFGASRNSEDYMLAQVAQITHTHHLGVLVIDEMQNLVTARRSCSDMLNFLVKMDNIVGVPVIRIGTNEAFPILQGNFRNARRGTGEGSVIWNRMMKDDEWDYFMEGMWEYQWTKISTSFSDEINEVFYEESQGIIDIAIKLYKMVQWRAISLAGKEVINVNLIKDAAKDGLYLVKPMLDAIRSGDEEWMIKYKDIASIDTTPYQNQCLSNIETKDLKEISRLARKQQTNGNLSATIRHIIIQLLELDVEPRLAKECAEKVVSSSDEETNISLLVKQAYALALEGGKENIAKVITHKIKVKPKYEDNDIRQIAENANKNKTAAYEGLKSAQLIKNPVDDFISFGYYNA

SEQ ID NO: 371 - protein, 316 aa, Calothrix sp.
MLSFFPIFYSDELLYSALARYHIRSGNKSFRQTDLELFGYSSQQVSKITLTNNLNYLVKNLSFFYRQTFDVLLQNHTLYPFYATFLTPQEAWLLKDSMKKKLSGSILEVAKVATNSTGDSRKFLKFCPTCLKEDEEKYGEPYWHRLHQIPGVLVCSEHSVPLLDSSIPIESKATQYHSASLENCDISISVIHYTDSTLEKLLNLVKDIEWLQNRKIEFKGLAWLRKKYQSCLISQGYISLLPGNKIVFDEQVFFDRIFDFYGKDFLDAIDLNLCTNRGKYFKYCLLGCDINPVIDRVTHILLVKFITNNFIEFFRS

SEQ ID NO: 372 - protein, 638 aa, Calothrix sp.
MLRFFPNPYPDEILYSMIARYHIRSGNISPKITQQEVFNSQSTVATADLPSNLDALIDNLKYISNYQIENFIYKHTLFPFYHPFLPPQRGVQVIESMKGENGGDIHTKIGITASSIAMPSYFRFCPKCLEEDLENYGEPYWHRLHQISGVLVCQNHQVFLQNSTATLHGLNKHEYYAASLECCIANPNQQNFSNHTLKKLTLLAQDIEWLINNKLPSQDARWFDKQYKFLLIQKGLANANGRVKLKQLLDEFIFFYGREMLGALDSMVDYEDESNWLFAIVRKHRKSFHPIRHLLFIRFLTEAVAEFFTADYQYKPFGNAPWLCLNAAADHYLQPVVTNLTVTHCLENKRPLGTFFCDCGMIYCRTGPDKTEQDKLRIGKIIQFGSVWEKKLKDLVEVQRLSLRETARQMNVDAKTVCRYVSKLKLRSCWKTLKNTQFTEFENIPEPNTDSATAIQLQHRAAWLGLQQQHPKASKTSLRKMSPATYIYLYRNDREWLYQNSPSLRKPISSIVKVDWDERDKHILKKAMDTVQSLLNQEKLVRINKSRIAKNIGSLALIEKHLDLMPLTKAYLESVTETIEEFQIRRIKWAIKRLDDCGEEILAWKVLRLAGLRENYTEKVNVILESLRYQPEKSVLPH

SEQ ID NO: 373 - protein, 243 aa, Calothrix sp.
MEEVIIACNLPTQANTRVIPIEALPRRDFQSYIPYFDLSFSLIGKTVDIDHGHKLFSALSYLVPAIHEIDSIAIHTIAGIPDDNGQLKLTKNSRLRIRLSANNIDLVYSLAEKSLNIGTHTVQLGVPQIYPLQPKDKLCARIVVIRPYQQPEPFLAAARRQLEKLGIQGIATIPTDRQGNPKRRSIKVNGFTVVGFTLEVSNLSEEDSLILQRYGIGGKSKMGCGIFVPVKERTEKVLEYYAN

SEQ ID NO: 374 - protein, 525 aa, Calothrix sp.
MPIDNLANSKISLNLSNPDITFLHSAGIAGLSMTLERLEQLYPMPALRPGNLNWLLTPRSISLNWEGKDLIALDWLLKQSFQINDEGLINFVALNYEKIDIYTQILIHQGITGTFLQHNNFFKSAGVASKSLIINDIKLTLWYKKAASYAHQNFANKLCDEHGNMLQQHIRIAGWLYPGAVVRHAAFNDKSKFEEKPEYALALLFAPVACQYFVLRSHVKPNQMEYALVIPEVTNLENYNEPYNNHSNWSYSNFHVSSLGEAGLKFLVHQKSVELARCHQIKQCQVIYFGVVEWSKQQKTPMAMRLVNATETICSLYKMVSSYFPEYKIHLSKDNAFIISSFVKSIIADNLSKNLPWWSNFYTTINFKNNQNKFIFNTVFYENRSIYKMVQNSDWDSETQKLYIQLCQEALKKRYAKIYSQTQEGEYTQIERENMRILSQLKLCISYEKFRKFITQFIGEAGKLTILETHWQELLPIVSGETDWKLARDLFFIALAGYPRSQAIDASAHEEKYTVNNSSGTHVNK

SEQ ID NO: 375 - protein, 313 aa, Calothrix sp.
MFHLFGNILTRYGTAANNRGQNEGNLSPLKKLIWKGEVHSYVSSEAIRFSLRHYWQESGYNVNRSWDEDNQDNNWQNPDFDPVTFIDDDVLGYMKAEAAKIEISDEIDVGEEIETKPSEEQKAKKKRKPKPKGTIRPRRGALEVVHAVSTLPYFDDITFNAASGAKGRTSLYSTEFHATSYQYGFALTPEHLKNKSRINAVLDGFISIGRVAGNNARFRFDYSPSIIVLRWTHDFSPRFFYCFEQNQLGQVSISDLVETVQAGDIDPKELWVGGVKNFEILQDLGMNVFPGVKSAVTALKQVIAEDLQLPLGS

SEQ ID NO: 376 - protein, 210 aa, Calothrix sp.
MTTIVLKVEVPIACFRQSRSREYIETYPVPPPSTMYGMLLSLVGEENRSKHCGVKLAMALLSEPEKSVTLRTFHRFKKSNIDASENVKPDFQELLTDVKLAVWINAGIDRARPTLPERLEQAFVNPASVNRFGGLCLGESRDLVNVVKVLSEKDKIEFLKWLVKDEDGSLVLPYWVDHVGSKGTRCLRYLLQQSAHQQPPELAWTTIQKD

SEQ ID NO: 377 - DNA, 184 bp, Calothrix sp.
  source 1..184: mol_type = other DNA
cacgtagaggtttagacgtagaccaacctcgtaacctagcaaaatctgtaaccgtagaataacatttacttcgtaggttgggtgtagttgtagaaacataaaaaagttgtacaataaataaaaaagttgtacaacaaataaaaaagttatacaatttatcctatgggtgagtatcaaccgccca

SEQ ID NO: 378 - DNA, 105 bp, Calothrix sp.
  source 1..105: mol_type = other DNA
cgtgtaaacccggacaaagtgaattagagaggataaaactgtaactacaatataaattttttatttacgtatataatatattttttttaactaggttacaccgaa

SEQ ID NO: 379 - DNA, 167 bp, Calothrix sp.
  source 1..167: mol_type = other DNA
agatgtcgttaggcgttgataactggtcgattccatagcgctccgcgaactgggcacttctgctccagcattagatgtcgttaggcgttgataacttatcgaaagattgcgcgcatttttaatcaactaatctgctccagcattagatgtcgttaggcgttgataac

SEQ ID NO: 380 - protein, 273 aa, Nostoc sp.
MVRGRGEWTQAKFERYRKEGRGRGSGKDYKPWITIQDFPSKGRSSRTPGWKTNRVHHLLSDHEKRLFYLFEWSDVVTDIREQFPLDDLDLAMSIATDMGIKYPVDDKTATPHILTTDFMLTVNQNGKQVQIARTVKPSTELDKERVAQKFELERWYYLTKGIDWAIVTENDISRLFAENVEWIHSAYRLEANSEMDLDQLLELANLLKSKLQENDNTINTITAALDKEMNIESGTSLYLFKHLIATKKIIIDMVEAKISDCPSSKVIIEILGE

SEQ ID NO: 381 - protein, 742 aa, Nostoc sp.
MNEDLFVNDLIQWQLNENNCLIERILWIDEGYIIAFVLNINSQKGLPEPKKVSEILEAMSEGLAFKQKQDPWARIVRDDNLTDREKEYRDKAWEIISSLIVQEPSIYYRNTRGSLVKQVIKKYNEGKEQDKLVEKTIYGYMRRFWQRGKNKNALIPDFMNSSGKGKIRGNSDKKRGRPKKYSYDPEISEGVNVTEEDRKIFRIAISKFYNNKKENYLTTAYDLMVKKYYKEGIRYDENGVIKPILTPAEEIPTITQFRYWYKSEQDDVTKTLISRIGAKKFALENRAILGTSKMETIGPGSRYQIDATVGDVYLLSKYNRNWIIGRPVIYIIIDVFSRMITGFYVGLEGPSWIGAMMALANVAVNKVMFCQEYNINITEEEWCCNQMPDAILGDRGELAGMAVEQLIPNLHVRIENTASYRADWKGLVERHFRTIHEHVKPFLPGYVDTDFRQRGARDYRLDAKFDIDQFTEIIILLIIWHNNNRLNKYERDEAMIADDVPPIPRELWKWGIANRSGRLRTFPEDIVKLNLMPTEKATITPKGIKLRGKDMYYICDRAEKEKWFEKARSNMLSKSEKSLIVSYDIRNPNFIYLPSEDGRNFEKCSLIDLEGRYINKNFYDIEYLLAYEELQKQKTQSKTLQEKVDLLADIEHRVSKAENMTEAAQDEQLSKSKKVAGIREHKAFEKAKRRENEGFELAIEEKQSISEALDSEPENLEQPNSLQPNYLDILKKNREEHKHGKQ

SEQ ID NO: 382 - protein, 555 aa, Nostoc sp.
MENNEGELVRIPNRELAVIAKYIDQKLPEYNANPLIQALPPIFSAEEFAAKVTKIPFWDDQDRNLESHYRFHCVERLSRYFDPQAKTIELQKLISVVIMTGYLSRNPLKPEYASRSRQIYNAIEDGGGKNLENYVNLPTSASGLTLIGSSGIGKTTNFINILKLYPQVICHPEYSVYQIVWLQVECPKTLKGLCTDIFAGIDKLLGTNLCRKFNPRYYSEDYLLAQLAQVAHTHHLGVLVIDEIQNLVNSTRSRAEILDFLVKLDNTIGIPVIRVGTNEAISILQGNFRNARRSTGEGSVIWERMINDEEWYFFMEGMWEYQWTKTPVPFSHEINEIFYNESQGIIDIAVKLYKMVQWKAISLRSEEIITVDLIRQAAKDGLYLVEPMLDAIRSGDKERMMKYKDITPVDITQYKQKCLYELESVDLKEIRRLAKKQQTQQKVSPKLNYVIIELLNLKIDAHKAKQCAEQVIFSSDEDSDIPSLVDKAYFLALGGGQINEKVVNTSTENTKLKPKYHENDIRLIVENAKKDKKSAYEYLKMAGIIKDPIKDFINI

SEQ ID NO: 383 - protein, 318 aa, Nostoc sp.
MMLSFFPILYPDELLYSGLARYHIRSGNRSFKQTDLELFGYSSQQVCKVTLTNNLNHLVNNLSLLSQQTINNLLQKHTLYPFYAILLMPQEAWLLKSSMSKKINESILEVAKMTNGSGGNSTKYLKFCHSCVGEDTQKYGEPYWHRLHQIPGVIVCPIHRIPLNNSLVPIETKEIHYHAPSDDNCPLNTGTTIYNDATLQKLLVFANDIEWLINNNFTFQGLSWLRSQYKTYLTNKNFITVFSKDKFIFHEQEFYNAVLAYYGQDFLEAINPKRIKNPDKYLSNCLLACDLNPVIDRVMHILIIKFLANSIEDFFKAQ

SEQ ID NO: 384 - protein, 230 aa, Nostoc sp.
MAIDYRLTVDNCYKETLACTNRKEFLTCQLQLIYADLSFRAIGQIIAIDHCYHLYSGISKFQPKLHDSKVVRICRITGNPDKFGKLHLNQNSRLRIRLPVDKIPLFYSLAGKSLRIGEDTIRLSIPQIELLQPTEKLRSRIVIIKGCQEPKSFLKVAQRQIEQLGIKGTVNIQANFDGTPKRRTIKVKESTLVGFGLEVKHLSEEDSLILQAYSIGGKHKMGCGFFVPLK

SEQ ID NO: 385 - protein, 534 aa, Nostoc sp.
MWVFRSTKIIIRNQKKFNCISKKCFRKHHSMSIAKSSVKSRIRLNLSDPSLTRLHIAGVAGLWMTLGQLEKLYPESAKRPSNLTWSRTPHSISLDWDGEEDFIVLDWLLKQSFKISDEGLIDLPGVNSQTGSIQTKIIKHLGIRGTFLQHNKSFKSAGNVSTVLIDEMEAIVLYKKVDEYAHQVFAKHLCNKQGQLLQEPIGIVGWLYPGAVIRHEVFREETKFHEKPELALALLFAPVACHYFVLGSHLEQEKPHFALVIPQVTNLELYAQHCWNLTDLDFDYFYASSLGDAGLRFLTYETNVQQTAFNPVGRCQVILFGKAAWSKQQKTRTEIVVLQASETVNSVYKLSCIFFPNYQNFKFKNETPIIANILRGIIADNLANSLSWWFNLSTKLQDNHLLELSNDDNQGIYKMISNSQWDIETQKLFIKCVHETLKIRYAKIYAQTKEDEYVQIERENIRIVSQLKRCTNAVNFRKFIAEFWGKTGHNPILQEHLDEILSITSGIMDWKIAKDLTFIALASYPKIKTTESNI

SEQ ID NO: 386 - protein, 320 aa, Nostoc sp.
MFHLFGNILTSYGTAANNRGENEGNVTPLQKLDWKGEVHTTVSSEAIRWALRYYWQNFGYLVNRRWDENAQPVANHIMQDHNFDDIRFIDDDVLGFMQAEAAKVEASDESEGESEGASQDENKKISKGKDKQTSPRKGKQKPKGKIIARRGVLEVTRAVSIIPFMGDITFNAVSGIKNRNSLYATEIHATRYQYGFALTPDSLKDKSRIHAVLDGLISIGEVAGNHARFLYDFSPESIVLRWTHDSSPRFLYCFEEDERRNITVPDLVRRVEAGDIDPKELWIGGAISKNIEDLGANVFPGVKAAVEALKQVISEDLELL

SEQ ID NO: 387 - protein, 210 aa, Nostoc sp.
MTTIALKVEVPVACFRQSRAREYVETYPVPPPSTVYGMLLSMIGEMNRYRHCGTQLAIALLSEPKKSTVIRKFHRFKKLDINAPSNIKPDYQELLTNIEFVVWIIAGTDKSKPTLPERLHLALTNPASINRFGGLCLGESRDLVNSVTMFSEKYEGQSFEWLVQNEEGLLTLPYWVDHVGSQGTRWQRYMLQKSLGRQPPELSWTVIQTA

SEQ ID NO: 388 - DNA, 133 bp, Nostoc sp.
  source 1..133: mol_type = other DNA
aataattcggttaaacaattaataattcggttaaacaattaataattcggctaaacaattaataattcggttaaacaataaccctttacagagtacgcttgtattaagaagatatgcgatcactctcaggggt

SEQ ID NO: 389 - DNA, 247 bp, Nostoc sp.
  source 1..247: mol_type = other DNA
aacgcctaaagacatcttatattgaaaagctaaatcagcaggagtgaaattaatcacaatatttcgtttctaaacgcctaaaggcaatctaatattgaagcaggcttgtggcttgaggaagagaaagttttaccaaatgtgatcaacgcctaaaggcaatctaatattgaagcagatccccagaacaacttgctatgatttgttccggtggtgatcaacgcctaaaggcaatctaatattgaagcag

SEQ ID NO: 390 - protein, 272 aa, Nostoc linckia
  source 1..272: note = FACHB-104
MARTKQEWTQAKFERYMKEGRGQGSGKNYQPWIKIQDFPSKGRVSRPPGWKTNREHHLFSDNEKRLFYLFEWSDSIIDIREQFPLLDLDLAINIATEMGIDYPKDPNNETPYVLTTDFMLSVKQGKQIVEKARTFKLVKDLGTKSVAEKFELEKRYYAAKGIDWGIITEKEIPMFLVKNVEWIHSSYKLEAAAEIKVDELHNIANILKSKLQKSDFTINKITNCLDKEMNLEVGTSLYIFKHLLANKKIIMDMQTSTISSSISAREIQNIIF

SEQ ID NO: 391 - protein, 742 aa, Nostoc linckia
  source 1..742: note = FACHB-104
MNKNLFVNDLIEWVDESGNTSVERILWIDEGYVIAFTININVKTGFPVSKSISDIQAAISEGHALKLKTDPWARIVRDEDLSAKEKEIRDKYWDIISPIVIQEPSIYYRDKRGSLIKQVVEKYNHNRREGKIIERSVYQIIRRYWQRGKDKNSLLPDYANSGGKGKVRASGEKKRGRPRKYAHEPEIGIGINITDEDKKIFRLAVTKFYHNQKENFLTTAYDLMIKNYYSEETIYDDNGVKKHILIPPDKRPTLTQFKYWYDVEQGDIRKKIISRRGAKKYALEHRAITGNSTMETIGPGSRYQIDATIADVYLVSAYNRNWIVGRPVIYVVIDVFSRMITGVYVGFEGPSWIGAMMALANAASNKVAFCKEYGIEITEDEWACHHIPDAILGDRGELAGMKVETLIPNLGIRIENAAPYRADWKGLVERHFGIFHGHIKPFVPGYIDKDFRERGARDYRLDSKLDIEQFTEIIIKIILYHNNENYLDNYERDEAMIADDVLPIPRELWQWGIANRSGRLRTIPEDIVKLNLMPTENATITERGIKFKGMYYTCEKAKNEFWFEKARSNSLSKLEKKLEISYDIRKPDYIYLRSPDGRDFEKCFLLESESKYLNKNLHEIEYLFAFEELQKQKNKGLKQQQKVDLITEIESVVNKAKKMTEETKDDKLSNRKRTAGIRDNRSVEKSKRREIEGFELEKSDNKNTSNTVDTESQKVEQPQSLQPNYLDILRQKREERKREQDR

SEQ ID NO: 392 - protein, 574 aa, Nostoc linckia
  source 1..574: note = FACHB-104
MIFFDRSERNESVNKIDDWRWVDIPNGESAAVAKYNDHKLPEYNNHPLIQALPPILSGEEFIEKAIILPSYAPEERELAAHRRFHCVERLSRYFQPLNKTVNLQQVMCALLMQGYIARNILKPEYARRSRQIYEAIKAGDGKNLDVYVNVPTSTSASGLTLIGPSGMGKSTNFSNILNLYPQVILHPEYSTYQIVWLKVDCPHAGSLKGLCTDIFVGIDRLLGTNYFKKFGASRNSEDYMLAQVAQIAHTHHLGVLVIDEMQNLVTARRSCSDMLNFLVKMDNIIGVPVIRIGTNEAFPILQGNFRNARRGTGEGSVIWDRMRNDDEWYFFMETMWEYQWTKISTDFSDELNDVFYDESQGIIDIAIKLYKMVQWRAISLSGKEEINVNLIKQSAKDGLFLVKPMLNAIRSGDKEWMIKYKDIAPIDTTEYYNQSLSNLQTNNLKEISRLAKKQQTENGHLSATQRHIILELLGLDVEPQLAKKCAAQVITSGEEDADIPILVKQAYALALGGQVQENTITKVRTRILKSKPKYQVNDIRLIVEKAKKNQTSAYEGLKSIGIIKDPVQDFITIT

SEQ ID NO: 393 - protein, 315 aa, Nostoc linckia
  source 1..315: note = FACHB-104
MLSFFPTLYPDELLYSALARYHIRSGNKSFRQTDIELFGFHSQQLSKVTLTNNLNYLVNNLPFYSRKRVDHLLCNHTLYPFYASFLTQQEIFLLGDSIKKKFHGSVFEIAKLSLKSTGNEKKFLKFCPVCLEEEIQQYGEPYWHRSHQIPGIYVCLNHNSFLHDSTVMIETKGIHYHAASSENCLRSDSQFSDSYQTLTQLLILAKDIEWLISSNFCFQGLSWLRNQYQSYLIKREFLTVLPGNKLKLHETELCQSIFEMYSQDFLSIVNINFIRNPAKYLSHCLLACDVNPVIDRITHILMIKFLANSLEWFFI

SEQ ID NO: 394 - protein, 205 aa, Nostoc linckia
  source 1..205: note = FACHB-104
MTQFPYVDLSFSIIGHTLPIDHGYELYAALTHLQSKLHSLDDLSIQTIPGIPDGNGSLRLNDHSRLRIRLPVDKIPLVYPFAGKSLTIGKHKIRLDIPQIYVLRAVEELRSRIVVIKGYEEPETFLKAAQRQIKKLGIQGTPSIPINANGKPKLRTIKIKQFKVVGFSLEVTNLCNEDSLSLQIHGIGGKQKMGCGVFVPSKEKQ

SEQ ID NO: 395 - protein, 510 aa, Nostoc linckia
  source 1..510: note = FACHB-104
MIENAINSKIQLDLSDPTMTWLHRAGMAGLWMTLKQLEQLYPIPQKRPGSLTWLLTPRTISLYWESEDFSVLDWLLKQSFQISNEGLIKLTALNFVELDLQTQIIIHLGITGTFLQHNQFFKSAGKESISLAVNGVKLVDEYQKAASYAHQHFAKKLCTKDGQLLQEPIGIAGWLYPGAVVRHYAFKAQTKFQEKPEHALALLFAPVACQYFILRSHTQATTKQYALVIPEVNDLEVYSARFSNLGDLSCKHFYVSSLGDAGLRFLSYEIARELVQQHKLQRCQVISFRNVTWSKQQKTRTEVALVEANEEVQLHYKLVISCFPEYEVFKHSSGNFIITSMCQCIIADNLANSLPWWSNFYALTKTKNSFKQIFHEKEGICKMIQNFEWNINEYKLFIETCHEALKVIYAKIYSKTKEDEYAQIERENTRIISQLGRCTNAATFREFISRLWGRAGHLSTLEEHWEELLPVTTGMIDWKIARDLTIIAIASYPIKRNKNAQNLKQEPTKA

SEQ ID NO: 396 - protein, 315 aa, Nostoc linckia
  source 1..315: note = FACHB-104
MFHLYGNILTCYGTAANNRGENEGNITTLQKIFWKGEVHTTVSAEAIRWALRYYWQNMGYPVNLVWDENAQPEADYILQDANHDNARFIDDDVLGFMNLEAAKVEAAIKIETDVQDEASSNKNKKPAKGKTKPKGTKLTKRGVLEVTRAVSMIPYSGNITFNAVSGKKSNTSLYGTEVHATRYQYGFAVTPNSLKDKSRINAILDGLISIGEVGGNHARFLYDFSPESIILRWTHDFSPRFLYCFAEDERGQLSVLNLRGRIEAGDINPKELWIGGAISNSLGDLGANVFSGVKAASEALKQVIAKDLQLSSRSL

SEQ ID NO: 397 - protein, 210 aa, Nostoc linckia
  source 1..210: note = FACHB-104
MTTITLKVEVPIACFRESRAREYVKTYPVPPPSTVYGMLLSLVGEENRYKHCGVNLAIALLSNPEKSVVMRKFRRFKHKDIQHPSNAKPDYQELLTNIEFFVWVTKGTDKAKPTLAERLQQAFANPTSINRFGGLCLGESRDLVNAVTLSPQKKDEELLRWLVQDEDGLITLPYWVDHVGSRGTRWLHYILQDSQLWQPPELSWTVIQST

SEQ ID NO: 398 - DNA, 185 bp, Nostoc linckia
  source 1..185: mol_type = other DNA; note = FACHB-104
caagttttgatttacctatcagcgtcggaattttagctgtggaaacataataaagttatacaataaataataaagttgtacaatgcataataaagttatacaatttctcctatgggtgagtattattccacctgtaggagattgtctttatggctagaaccaagcaagagtggacgcaagctaag

SEQ ID NO: 399 - DNA, 242 bp, Nostoc linckia
  source 1..242: mol_type = other DNA; note = FACHB-104
cttcaacattttatgccgtcaggcgttgagcaggctttataagtagtgccgtccaaaaaagataaaacgtacttcaacattttatgccgtcaggcgttgagcagcccagatgctgagtcctcatctgcaaaaatggtgtatgcttcaacattttatgccgtcaggcgttgggcagcggaagattgtgattaacttgacttcggctgatttagtgcttcagcattttatgccgtcaggcgttg

SEQ ID NO: 400 - protein, 272 aa, Dolichospermum sp.
  source 1..272: note = DET69
MGRSRRDWTQDKFERYIKEGRGQGSGSNYQPWIKIQDFPSKGRVSRPPGWKTNREHHLLSDHERRMFYVFEWSDVVIDTREQFPLLDLDLIMSIAEDMGFKYPKDPNSDTPYILTTDFMLSVKENGKNVQKARTVKQVKDISSTSVANKFELERRYYAAKDIDWGIITEKEIPRLLAENVEWVHSAYKLEATNEINIEELRDIAQILKSRLQESDTTINRVTTSLDKEMNLESGTSLYIFKHLIARKEILMDMLGTKISSCPSTTVIQKIVF

SEQ ID NO: 401 - protein, 745 aa, Dolichospermum sp.
  source 1..745: note = DET69
MDSNLFVNDLIEWTNESSENLIERIIWIDEGYIIAFVLDINADKGFPEPKNITATIEAIHDGRALKLKSDPWARIVRDEDLSDKEKEIRDKAWNIISTLVIQEPEIYYRDKRGSLIKNIINQYTKQKQEERLTEKTVYKYLRKFWQRGKNKNALLPDYVNSGGKGKLKASGDKKRGRPRKYAHISEIGSGINITEDDKKVFRFAISKFYNNPKQNFLTTAYNLMIKEYYAEEIIFDENGVRRSILISPEQRPTFTQFKYWYEVEQTDIRKTIISRKGAKKYDLEHRAILGTSQMETIGPGSRYQIDATIADVYLVSQYNRNWIIGRPIIYVIIDVFSRMITGIYVGLEGPSWTGAMMALANAATNKVKFCQEYGIEITEEEWLCQHIPDAILGDRGELAGMKVETLIPNLNVRIENAAPYRADLKGLVERHFRIIHGYVKPFVPGYIDTDFRQRGGHDYRLDSRLDINQFTEIVINLILYHNNHHFLEKYDRDEMMIADDVTPIPRELWKWGIANRSGRLRTFPEDIIKLNLMPVDRATITARGIKFKGMYYTCEKAKKEYWFEKARSNLLSKTDKFLEISYDIRNLDYIYLRSPDGRDFEKCYLIDPEARYINKNLHDIEYLFDYEKLQNQKNKGKELQEEVDLFANIENVVKKAEAMTEEVQDDKISASKKVAKIRDNRNFEKTKRRESESFELAKVETPNTIEPIEVIETKIEDTEQPQSLQPNHLDILKQKRLERKRGKKE

SEQ ID NO: 402 - protein, 569 aa, Dolichospermum sp.
  source 1..569: note = DET69
MFSNKNDWSANVERKNDFKWVEIPNGEWAALAKYNDHQLPEYNSNPLIQALPPILSKEEFVDRVIKSPDYNPAEREIEAQYRFHCIERLSRYFDPQNKTVELQKVICVLIMQGYLARNILKPDYARRSRQIYDAIKDGGGKTLDNYVDVPTSASGLTLIGPSGMGKSTNLLNILALYPQVILHPEQSTFQIVWLKVDCPHAGSLKGLCVDIFLAIDRLLGTNYFKKFGSRGNSEDYMLAQVAQISHTHNLGVLVIDEMQNLVNARRNKDDLLNFLVKMDNTIGVPVIRVGTNEAFPILQGNFRNARRGTGEGSVIWDRMLQDDEWDFFMEGIWEYQWTKTSVSFSNEINKYFYSESQGIIDIAIKLYKMVQWRAISLGGDEKITVDLIRQAAKDGLYLVKPMLDAIRSGDQEWMLKYKDIAPLDTTEYYKQCLSNLEGRDLKEIRRLARKKQGNTVSPKLNYVIIELLNLDVEASTAKECAEIVVASNEDDEDITSLVKKAYTLALSGGQSQVSPTKTTTSKTKVKPKYQTDDMRQIVEKAKKDQTSAYEDLKSLGIIKDPVQDFIKTY

SEQ ID NO: 403 - protein, 313 aa, Dolichospermum sp.
  source 1..313: note = DET69
MLSFFPKLYPDELLYSGLARYHIRSGNKSFRQSHLELFQSSLQKGRLILPNNLNKLIKILPFGTSITIENIIQGHTLYPFYTTFLTQNEAWLLKDVMKKQVNQSIFQVAKVALNSTDNLKFLRFCPLCLEEDMKNYGEAYWHRTHQFPSVMVCAIHNVLLYDSLVSLKSAGINYYAAHLGNCLINQQNNDNTEQFLQQLLMIARTTCELINLNFSFKGLAWLRSQYKSYLVKQKFMSLLPGGKFIFQDQYFSDCMVDFYGYNCLKAINPNLLKKPDTFFINCLLSCDMNQVIDRTTHILIIKFLATSIEDFFK

SEQ ID NO: 404 - protein, 214 aa, Dolichospermum sp.
  source 1..214: note = DET69
MYPNEALNPQLTYVDLSFSIIGQTLPIDHGYGLYAALSHIKSQIHALDNLSIQTIPGIPDKQGLLQLQLNDHSRLRMRLQAEKIPLVYSFAGKSLTIGKHSIRLGIPQIYLLQPVENLRSRIVVIKGYEQPETFLAAAQRQLEKLGIQGTVRIPTNTDGQPERRTIKIKKFTVVGFRLEVKNLSDEDSLMLQVYGIGGKHKMGCGVFVPIKNSR

SEQ ID NO: 405 - protein, 509 aa, Dolichospermum sp.
  source 1..509: note = DET69
MPIVESLVKPKIQLNLSDSNMTWLHGAGMAGLWMTLKQLEKIYPICTQRVGNLTWSLTPRSISLFWEGQDFIVLDWLLKQSFQISDNGLIFLMGLNNPLDLQTQIVIHQGITATFLQHNKFFKSAGTASSLITIDKIKFLVKYKKAAYYANQHFAKHLCDNHGQFLKNPIGVKGWLYPGCVVRHYAFEKETTFKEKPEYALILLFAPMACQYFALLSPISPDETQYALIIPKVLDLELYAQYYWQLENLSYKYFHASSIGDAGLKFLTYANAGEMNQLNPVKQCQVILFGTADWSERQKTRIEIAIVELNEKIDYYYQISRRYFADTGFFQYKNQNCLYISFVRGMIADNLAKGFPWWSNFYIKIKNKNLLNQIFKEHKQIYNMIQNSNFDFPSQKLFILACHEALRKRYAKIYSNTKEGDYAQIERENKRLVSQLGRCTNADNFRKFIAEFWGKAGQISILQEHWEELLPITTGATNWQIARDLTFIAIASYQKRKEPGLETSGKSES

SEQ ID NO: 406 - protein, 311 aa, Dolichospermum sp.
  source 1..311: note = DET69
MLHLFGNILTSYGTAANNRGENEGNITSLQKIIWKGEVHTTVSAEAIRWALRYYWQNSGYPVNRIWNENAQPESEHVWQDINFDNVRFIDDDVLGFMRAEAAKNEISEESEDELQEETLDQNKKTRKAKSKQKPKGKKTARRGALEVTRAVSMIPFAGDITFNAVSGKKERTSLYGTEVHATRYQYGFALIPQSLTDQVRINAILDGLISIGEVAGNHARFLYDFSPESIILRWTHDFSPRILYCFETDELGNISVPDLVRRIEAGDIEPNELWIGGAISRDLEDLGTHVFPGVKAAVAALKQVINQDLHL

SEQ ID NO: 407 - protein, 210 aa, Dolichospermum sp.
  source 1..210: note = DET69
MTTIALKVEVPIACFRQSRAREYAETYPVPPPSTVYGMLLSLVGEENRYKHCGVKLAIALLSEPEKSVVIRTSRRFKKKNIHDLSNSRPDYQELLTNIELVVWLKTGEDQATPTLLERLQQAFNNPASVNRFGGLCLGESRDLVNAVSFVPENYQGESLLWLIQDETGFLTLPYWVDHVGSKGTRWQRYTLQESQIWQPPDLSWTVIQSV

SEQ ID NO: 408 - DNA, 316 bp, Dolichospermum sp.
  source 1..316: mol_type = other DNA; note = DET69
tacagttatcccgttgcaattgttagcttatcatattgcggcgcggcggggtttggatgtagatcaaccaaggaatttggcgaaatctgtaacagttgaataatgaacctagtaggggcgtattgcaaatgtggaggaataaaaaagttggaaaacaaataaaaaagttggaaaataaataaaaaagttgtacaatttctcctatgggtgtatctaccaatcatccaaaggagaattttttgtgggtaggagtaggcgagactggacacaagataaatttgaacgttacataaaggaaggtcgtggtcagggtagt

SEQ ID NO: 409 - DNA, 197 bp, Dolichospermum sp.
  source 1..197: mol_type = other DNA; note = DET69
aaaaacttgctaattaaaatgtctgaatcaggatacccaccgatttaaggattgacaggatttaatattgagatatttgcaaactttttgtttttcagattatttcatggataacaatcctgtaaatctttaaatcctctaaatcctgattctgacagtttatctaaaattttggccgatgttgaatccaaggatta

SEQ ID NO: 410 - DNA, 252 bp, Dolichospermum sp.
  source 1..252: mol_type = other DNA; note = DET69
gtggttcagcattagatgccgtcaggcgttgagcagtctaaagtcgctagacaaatacaagaatcccaccgtggttcagcattagatgccgtcaggcgttgagcagtcaaagtcccgccatttagagcaatattatcaacgtggttcagcattagatgccgtcaggcgttgagcagtgctttttccgatttcgcttggtttggcagtgttcgcaggtgcttcagcattagatgccgtcaggcgttgagcagt

SEQ ID NO: 411 - protein, 229 aa, Phormidium sp.
  source 1..229: note = FACHB-592
MTSGILRTTLSNRFSSSHNSQLLNQTYVDLVFGVTGQEINREHGYQLYAALSSYKPLLHYLEGISIQLINGSPIQKNIIRLTKQSRLRMRLPNDQISNFYSLAGKVFSIGSQEIRLGIPQIHPLEAAQNLYSPIVVIRGYQEPSSFLEAAYRQLQKLDIEARINLLTNSNSEPSRRTMRVKQFTLIGFGLEVTNLCEQDSLLLQVHGLGGKQKMGCGFFTPQLNTIGNR

SEQ ID NO: 412 - protein, 502 aa, Phormidium sp.
  source 1..502: note = FACHB-592
MKIRLRIGCPAMTLLHLAGLAGLSMTLRKLQENYPTENLRPGRLNWSLTSSEICISWNGEDFEVLDWLLNQAFQVSDRGIIVLTGLCSDQMSIEAQLALHKCITRTFLQHNKSVSSDGQGSELIRLNGRDVEVKYKKVKRYGHQDFAKKLCDQKGLLRTEPIGIVSWLYPGLTVRHNAFHKHTKFEEPVELILVLLFAIVACRYFILPNSAQGSKRQYVLVIPEFTSLESYLGDQKQAEKLNYGDFFAFGLGDAGLKSITCKSGKELSEELQPHRGQVILFDQAPWSPQQNTRSIVLDLCVREETLSSYRVFREFDLEAIICGCTNQRSKLAYSFVGKIITENLANNQPWWFGLSEYSQNAEFFKLILDGREVLLYMLRKTKRNSSAEELFIQACHETLKRIYAKIYDRTQEGEVAQIERKNQQLRYQLRLCKNEASFRGFLTSFLAEAAPNKIVVDNQSELMPILTGTVDWRVTKDLFLLSMVSYKKVGNLVKEDAAQKSE

SEQ ID NO: 413 - protein, 302 aa, Phormidium sp.
  source 1..302: note = FACHB-592
HLFGNILTTYGAAANNRGQSEGNLATLQKIMWQGEVHSTVSAEAIRWACRLSLQERGYTINREWHNDILKFSLKNTDFDSEVYADDDIFGFMKAEAAKIDGSDQNHEKPKSTSNNAEAQYQRPKGTVIARRGALEVGRAVSINPFMGDVIFNAKSGEKGRTSLYSTEVHATRYQYGFTLTPNHLKDKTRTLAVLDCLASLRAVGGNHAHFLYDFSPSSLVLRWTPDFAPRLLYCFEEDEDGNISSQNLIRQISSGDIEPEELWAGGLYSEALAEYGVHVFPGVKAAVEAIKNVIAKDLQVSP

SEQ ID NO: 414 - protein, 212 aa, Phormidium sp.
  source 1..212: note = FACHB-592
MIALRVEVPIACFRQSHAREYIETYPVPPPATVYGMLLSVLGELNCYSHCGTQLAIALAEKLEKSTVIRTVHRFKTRDVADSSNIRLDYQELVTNVELFVWVVAGSDKSRPNLPERIQEAFANPASITRFGGLCLGESHDLVNAINIVGEEQQKALYWLVQSRTGYLTLPYWVNHVGLKGTYWKRYELQKLMQPYPLANAWTEIQPYQHDSS

SEQ ID NO: 415 - protein, 269 aa, Phormidium sp.
  source 1..269: note = FACHB-592
MSKLSVEKWTHATLDRFLKEQRGIGEGRNYRPWFEVDEFSSNGRARRLDWWQTGRVHHLFSDHERRLFHLCAWSNRVVDIREQYPLLDLELAMKIAADMGIKYPQGKDGTPWVLTTDFMLTLKQGEERIQIPWTVKPTDKLQSKTVMQNFELEKRYYAAKGNNRWSIITQEGIHRGMAENIEWFFSDYWLEDDPNLHSLKHELKIRLKTKNKAIHEITTALDKEMNIAGEGISLRIFRHLLARKEVIVDMKQKSINGYLLTNEILEIIC

SEQ ID NO: 416 - protein, 764 aa, Phormidium sp.
  source 1..764: note = FACHB-592
MLRPSSNMEFCLFERQVIKWEVGSEHESTKRVLWIDINNVFAFIFDLNVQSGFPEVKEVAEILEAVSRGTAIQIRDPWERLVFDNNFSSRELAVRDKAWNIISPIVEQEPDIYYRDFRGSAIKKIVEAYNIDRTEGKLVEKTVYSYLRRYFQRGKTINALLPDYSNSAGKGKPKGFSDKKRGRPRQFAHDSIIGPGINLSEEDQRNIRLSLLTDYCNLKENSLDRSYDMMLARFYSAESFLDEKGVQKVILQPQSKVPSLDQYKDFYYRKIRKDIQRVIISRKGTKYFEQNARAITGSSRAETVGAGSRFQIDATILGVYAASKFTRIDVIGRPVVYVVIDVSTEMITGLYVGLEGPSWTGAMMALANCAEDKVEFCQRYGINIMPEEWPCHHLPKVILGDRGELVHMPVEEKYIPNLHIAIENAPSGRPDWKGLIEGCFRRIQGHIKPYSSGFVDPDYRQKGQEDYRRKANLDIDQITAQIIRIILFYNNENYLKDYELDQQMLTAGINPIPRELWHWMINKRSGGLRPVKDDLDYVCFCLMPTRTVTLTENGIKLPLNGKALYYRCDRADEEGWLVRARNKALSKSEKKLTASLDLRKTKFIYLHTSDGKEFEKCYVIDPQGLYEGKHFEDTECKFGQEKLKQSRYEGNQRQAKVNLMTELSAIDKAGADMTQAALQANPTSGAQRVADMSTKKAIEKFSRSKDEGFEIDKSVEQATEQVNNQMNKTDEARTTSNPTQLTSYAPDHLDILLRSREENQNGGL

SEQ ID NO: 417 - protein, 566 aa, Phormidium sp.
  source 1..566: note = FACHB-592
MEVSNYKDVIKIPNGSWAVVAKYCDHKQPEYNLNPLSRALPLKLSIQDFIKNVKTLPIFDEREKEWGNYDRFDCIERLSRYFDPESKTIELYYKIWTVIASGYLGRNPIRPEYAQRAIQLYTALSSKGGKYIENFVKAPLSAPSITLFAPSGVGKTANRTSILELFPQIIAHPELGGDYYQIVWLCIDSPITSLKGFCSDIFMGFDRLLGSNYFDRHVSRNKSVDDMLAQVAILAHKHHLGVLVVEEMQAFFKLKNDRDEAIKFLTKLDNTLGVPLIRIGTDEMSGLFKDTFVSARRATGTAVIMWDRIINAKEWEFFFEGMWQYQWTRTFTPCSDELMSLFYEITQGIHDIAIKLYKMVQWRAISLGGDEVISIDLIRQAASESLVLVEPMLKYIREHPDKDDWKLKYSNIQLETAEYRIRCLEKLEIAELEALRLQNQMWAKKVSYSSPKVRQVIVALVQDLGVAPSVAKQSAEKAVAADEGSADLASLVSKAYIIALQTEQAVEEASSIEEAKKKVKEKKLNPTYAEDDLRLIADNAKKNNVKVYDALIESGSILDNPLKILY

SEQ ID NO: 418 - protein, 315 aa, Phormidium sp.
  source 1..315: note = FACHB-592
MVNFLPHPYPDEHFYSLLTRCHMRSADKKLRKTLKGLLGYSSKKLFRQDLPDGLSNLMMSLPPASPHFVEDLIQNHTLYPFYKSFLTPSEAWLLKHRMIKATNESFISLAKLSPDGLDSNRKFLQFCPACLEEEEARYGEAYWHRMHQAPGVFVCSNHKVPLQDSLIPLHNIDREYVPANTYNCPNNRSKNRYSEVALQTLLTLYDDIEWLMYSAPSFKGLKWLRKRYQTFLTQQDYVSTLPKSKSDFNSQTLFEDITNFYGLEVLDLIKPDKVANMKVYLECCLLACDIDQVIDRITHLLLIKFLSGSLEHFFN

SEQ ID NO: 419 - DNA, 178 bp, Phormidium sp.
  source 1..178: mol_type = other DNA; note = FACHB-592
caatgagctgagatgtcgcaaggcgttaagaacttttcgggtccggatgaggcagccattaaacaacacgcacaatgagctgagatgtcgcaaggcgttaagaactggatgaaaaagcaccccctggcaagctgtatgtcagcgcaataagctgagatgtcgcgaggcgttgagaact

SEQ ID NO: 420 - protein, 220 aa, Tildeniella nuda
  source 1..220: note = ZEHNDER 1965/U140
MTSSVWKTTLSNHLSSNNKYQLLNQTYADLVFELIGQEISRDYGYKLYAALSHCKPLLHSLESISIQLINGSPTQKSRLRMRLPADHIPNFYSLAGKTLSIGDRKIRLGVPQIHPLEAAQNLYSPIVVIRGYQEPSSFLEAAYRQFQKLGIEAEMNLLVNRNSEPSRRVMRVKQFTLVGFGLEVTNLCEQDSLLLQVHGIGGKQKMGCGFFTPQLKIGNR

SEQ ID NO: 421 - protein, 491 aa, Tildeniella nuda
  source 1..491: note = ZEHNDER 1965/U140
MTLLHLAGFVGLWMTLRKLQENYPTENLRPGRLNWSLAPSEICITWNGEDFEVLDWLLNRAFQVDNKGLIVLTGLYSDQMSIEAQLARHQCLTRTFLQHNKSISSDGQGSEFIRLSGRDVEVKYKKVKRYGHQDFAKKLCDEKGMLRTEPIGIVSWLYPGLTVRHYAFKEHTKFEEPVELIFVLLFAIVACKYFILLNSAEGSKRQYALVIPEFTDLEGYLGNQKQAEKLSYGDFFAFGLGDAGLKSITCQPGKEFSEELQPYRGQVILFNQAPWSLQQNTRSIILHLCIREETLSPYSVFREFDLQTMVWNCTSQRSKLAYSFAGKIITENLANNQPWWSSFSEYSQNEEFFQLILDARKVLLYMLRKTKHDSRAEELFIQACHETFRRIYAKIYDRTQDGEFAQIERKNQQLRYRLRLCKNEDAFRGFLTGFLAEAVPNSVVVNNQTELMPILTGQIDWKLTRDLFLLSMVSYKKVGNLAEESVSQKGE

SEQ ID NO: 422 - protein, 303 aa, Tildeniella nuda
  source 1..303: note = ZEHNDER 1965/U140
MRHLFGNFLTHYGIAANNRGENEGNLATLQKILWKGEVHSTVSGESTRWSLRYSLQKRGYDVNREWNDDTCSFTLKNPDYDSEAYADDDIFGFLRLEAAKVDGSDQIQQESKSKASKSKLTQEPKGTNISRRGALEVARAVSINSFMGDTIFNAKSGEKGRNSLYSTEVHATKYQYGFALTPDHLKDKSRAFAVLDCLISLSQVGGNHARFLYDFSPSSLVLRWTHDFAPRLLYCFEEDEDGNISSQNLIRQISSGDIDPEELWVGGLCSEALAECGAHVFPGVKAAVEAIKNVIARDLQVSL

SEQ ID NO: 423 - protein, 212 aa, Tildeniella nuda
  source 1..212: note = ZEHNDER 1965/U140
MIALRVEVPIACFRQSRAREYIETYLVPPPATVYGMLLSITGETNRYLHCGTQLAIALTKELEKSTVVRTVHRFKTRDVADSSNIRLDYQELVTGVELIVWVAAGSDKSRPTLPERIQEAFANPALITRFGGLCLGESHDLVNAINIVGEEQQEALYWLVQSKTGYLTLPYWVNHLGLKGTYWKRYELQKLMQPYPSANAWTEIQSYQYDSS

SEQ ID NO: 424 - protein, 284 aa, Tildeniella nuda
  source 1..284: note = ZEHNDER 1965/U140
MRPDRDWSEKKYEKYLKEGRGDGCGKQYIPWIQVYKFHPKTGRTRIPGWTTGREHHLLSFLEQKFFLLLDWSDIVFDIQEQFPMLDYELAQKIAKELNWKYPINSRSNFPYILTTDFLVSYKENGREKKIAIAIKPSSALKKWDKSCQPDEKNVLSRLELEYRYWELKKIEWKLVTERQLPEVLTYNLNFIHGDLHLEATTQNSIEELQIAVPTVKEHFAKFQGCEKSIYSITDYLDRTLKLQEGTAFRIFKHLIACKKIIVNLETFQLDENPSMTLVKQVVFS

SEQ ID NO: 425 - protein, 783 aa, Tildeniella nuda
  source 1..783: note = ZEHNDER 1965/U140
MSIYLTVNRLIEWNNEAGEPIIERILWVAPDYTILFAIEIFGTSALPTKRRTYDVEAALSEGHAQLLDDDPFAKYISEESLATQQKKGKKKGTEELSRDKAIRDKNFELISSLVGSEMEPDIFLADKRGPLIEAIVEMHNAGKEKGTRRSKNKSRVSAKTIYVNLKKYWQRGKNKNALLPDYPNSGGFGVPKAAGEKKRGRPRNPELVSKFGEGINVCESIRKIIRVGFEEFFNSTRKNPLRTAFKLTKRKYFIGREILDEKGKKRKEEIPPSERITFEQFEYWSQKDIDIEKTEKSRRGSIAYARDVAPHLGSVKAPGPGYQYLIDAVILDVYVISQFNSNWIVGRPVAYIVMDVYSRLIVGIYVGLEGPSWMGAMMALANVAEDKVSFCKKYGFSITEEEWPCREMPYEILADNGEMAGKKPDTLINNLDIRVVNAPPYRPDWKGVLERYFRTIQKYVEPFLPGYVVPRREGPDYRLDAKLTLKSVTKIMLKIIVWHNNFHRIKSYSRTEEMIANDVPPVPIKLWNFGRRYTGNPRYFPEDIVKLNLLPTAQARVTPRGIVFKGRRYYSESPQIKKLIQLANVGYLTEGEKNLDISFDLRRPDVIYVREERGRTYEKLFLHPSEKKYFGKSIEEIEYLIKRENLDHKLGEEDEFQGEAQLMDQIEAEVAETKSEAKAQYDPSLSKTKKLSGISNNRGRDKDANRAVEGEEYEFGDPEPLGLLEVEQSLESLGAVGSEQETKIGHSDSTEALDESKVQPEPLSARARRRNSIKQAKEKANGS

SEQ ID NO: 426 - protein, 582 aa, Tildeniella nuda
  source 1..582: note = ZEHNDER 1965/U140
MDPENQWILLPSGIYAHVADYKLHGVPEYDCNPLLQALPAVLEEHEFFERVQSYPSSTSEERNQSPRTRHQFVHRLTGPIPNLHFYHLTPNLKPVVNGYFHPLPEHIGIYDAINGAIMQGYIARGIYSPKDAERAQQIHGAAVQKAGHNLAQFISASSSAHGNILIGLSGCGKTTAVLRALSVYPQVIYHPEYDFLQLVYLVVNCPHAGSIKELCLFVFREVDRTFGLAGKKSYANKYSISTTSEGTLLAEVAAIADKYRLGLLFIDELQNLTAAKKELPERMLNYFVNLVNIGIPVFQAGTRRAAKLLRGSLSKARRAGGVQWGRILDKEDWSNFIQSLFESQWTRTPTPYTAEIGEAFVKECKFIPDLAIKLHKACQWRAIADGGDEIITAKLLGEVAQEIFINLRPLLDSIQDNNSENIDLYEDLLDNFDIEEFRETCSQKTKKRESDELHRRSKERRKKEEEIVLKQQFLTKALYELDETLDSFLVKACVEKALESNPKEEDLQSLITAAHKLALDSLVSKFSNVANKKQSKAVLEYRENDLRLITKKAQESNISEFEVLQSYGIFMDPVEKFLVQNG

SEQ ID NO: 427 - protein, 318 aa, Tildeniella nuda
  source 1..318: note = ZEHNDER 1965/U140
MGYLILNIKPYPDELLCSIIARYHIRTGNESFSRTHKEFFGKSSQQTRDFFLPCDIGDFVSNLYLKKYTVDGIIQNHTLYPFYKAFLTDAEAWQVRRSMGGVQNRSISELARISLIEEAYFRKFLRFCPNCLQNHLEQYGESYWNRLHNIPGISVCLVHGSHLLDSKIKIQTQKIEYQAASLENCVFSDRVSSYREETLQALLSFAKDTQFIMNQSFVFKGFSWLRKKYKAYLVEKGYLRFSRMGEANFDAQKFAEDFTSYYGHDFLESTHLSLSNKPEVYLSLCLLACDIQPAIDRIAHILLIKFLVPSITDFISDA

SEQ ID NO: 428 - DNA, 178 bp, Tildeniella nuda
  source 1..178: mol_type = other DNA; note = ZEHNDER 1965/U140
cgcaatgagctgagatgtcgtaaggcgttaagaacagccagctagcgctgaacgactttttcgtcggcacgcgcaatgagctgagatgtcgtaaggcgttaagaacgcgagtgttggcttgaataaatggattgtgagtggcaacttgatgaactgagatgtcgttaggcgttgagaa

SEQ ID NO: 429 - protein, 272 aa, Nostoc sp.
  source 1..272: note = JL31
MARSKQDWTQAKFERYSKEGRDQGNGKNYQPWIKIQDFPSKGRVSRPPGWKTNREHHLLSDNEKRLFYVFEWSDTIVDIREQFPLIDLDLAMSIAEEIGINYPKDPQSNTPRVLTTDFMLSVKQGKTIVQKARTFKLTKDLGSKSVAEKFELEKRYYAAKGIDWGIITEKEVPKLLAENVEWIHTAYKLEGNADIKLEELRNIANILKSRLQESDASINRITTSLDKNMNLESGTSLYLFRHLIANKEIIIDMLTTKISSCPSSREIKKIVF

SEQ ID NO: 430 - protein, 745 aa, Nostoc sp.
  source 1..745: note = JL31
MINDLFVNDLIEWIDESGNTFIERVIWIDEGYIIAFVFNINTQTGFPEPKKISEIIEAISDGRALKLKSDPWARIVTEENLSEKEKELRDRAWEIISFIVIQEPSIYYRDYRGALVQQTIEKYNAGRSKGKLVEISVYKYLRRFWQRGKNKNALLPDYVNSGGKGKPKAFGEKKRGRPRKYVHAQEIGVGINVTEEDKKIFRFAIAKFYNNSKENFLTTAYDLMIKKYYSEDFYYDENGVKKSILISPDKRPTFTQFKYWHKVEQPDIRKTIISRKGSTKYALEHRAITGNSQMETIGPGSRYQIDATIADVYLISMYNRNWIIGRPVIYVVIDVFSRMITGVYVGLEGPSWAGAMMALANSAIDKVQFCREYGVEISEDEWPCRHIPDAILGDRGELAGMKVETLIPNLNVRIENAAPYRADWKGLVERQFRTIHGYVKPFVPGYIDTDFRQRGGHDYRLDGRLNIDEFTKVVIFLILQHNNHDYLTKYARDEMMIADDVNPIPRELWQWGIANRSGKLRTCEEDIVKLNLMPTGKATITARGIKFKGMYYTCEKARKEFWFEKSRSSLLSKSEKSLDISYDIRQSKYIYLRSPNGRDFEKCFLLDSEQRYLDKNLYDIEYLFAYEELQRQKNQGKQLQEKVDLIANIESIVSKAKEDTEAVLDDNTSNRQKVAGIRENRAFEKDRRRKNEGFELAKEEITNSTEAMNNKVNTQSEDSESSKLLKPDHMDLLRRKRQERKRGED

SEQ ID NO: 431 - protein, 548 aa, Nostoc sp.
  source 1..548: note = JL31
MIPNRKSAIVARYIDQKLLEYNTNPLIQALPPILSSEEFIDKVTRTPDFDEQERQLEAHYRFHCIERLSRYFDPQNKTVELQKVISVLIMTGYLARNILKPEYASRSRQIYNAIKDGGGKNLENYVNLPTSASGLTLIGPSGMGKSTNFQNILNLYPQIILHPEYSVYQIVWLMVDCPHAGSLKGLCTDIFLGVDKLLGTNYFKKFGSSRNSEDYMLAQVAQIAHTHHLGALVIDEMQNLVTARRSSSDMLNFLVKMDNTVGIPVIRVGTNEAFPILQGNFRNARRGTGEGSVIWDRMVNDDEWYFFMEGMWEYQCTKMHVPFCDEINEVFYDESQGIIDIAVKLYKMVQWRAISIGGKEIITIDIIRQAAKDGLYLVKPMLDAIRSGDKEWMIKYKDIAPLDTTEYQNKCLSELDSKDLQEIRRLARKQQTHQKVSPKLNYVILELLKLEVEPAKAKECAEQVIVSSDEDADITLLTRKAYTLALQGGQVNESLVKANTSKAKLKPKYQENDIRRIVENAKKEKKSAYDDLKLAGIIKNPVEDFINI

SEQ ID NO: 432 - protein, 316 aa, Nostoc sp.
  source 1..316: note = JL31
MMLSFFPTLYPDELLYSTLARYHIRSGNNSFKQTDLEVFGYSSQQVCKVTLTNNLNYLVKNLPLCSQQTVDNLLQNHTLYPFYGTFLMPQEAWLLKDSMSKKLSGSILEVAKVATGSSGESKKFLKFCPKCLEEDTQQYGEPYWHRTHQVPGILVCPTHGVVLCDSSVAVESKGIHYYAANLDNCLVITDVKSFTNQALKTLLTLTNDINLLIHSNFAFKGLVWLRTQYQRYLVNKGLLQIFPGGKFKFDEYAFSKLIFDFYGQESLEALNPKLTQHQGKYFSHCLLGCDLNPAVDRITHILMVKFLANSIEAFFQ

SEQ ID NO: 433 - protein, 501 aa, Nostoc sp.
  source 1..501: note = JL31
MLGFFPAPYPDEILYSILARYHIRSGNTSPKIALLELFNSQDVIATVDLPSNLNSLIENLQFISNYQVEDLIYKYTLYPFYSVFLPPKRASQVMDSMKADFGGDIHTRTGIMASSLKMQRYLRFCPKCLEEDLQNYGESYWHRLHQTPGVLVCPIHGVTLQDSTIPMQGFNRHEYYAASQENCPVVPIQQAYSQETLKKLRLLTQDISWLITSNLFSRELEWFQRKYIALLTEKDFATATGRVNQKRLLDNFLFFYGAEVLEAVNSMVNYENEQNWLFSIVRKHRKSFHPIRHLLIIRFLTNSIEEFFNTDYQYKPFGEGSWLCLNAAVDHYLKPVITNLVVTHCLDNKKPLGTFSCSCGMVYCRTGPDKTDQDKQRIGRVKTYGQFWDQKLKELVEIQKLGLRETARQLKVDSRTVKRYTAILKLKTFWKSSQENQLVDSQEVLDSNLNLASDDKIKYREVWKALQQQYPEASKTTLRGLGKGTYEPIPLIPKYGIGFCF

SEQ ID NO: 434 - protein, 233 aa, Nostoc sp.
  source 1..233: note = JL31
MVVDCSLLTQILSESPVNRTKPTEVLIPQLPYIDLIFNLIGETVPLDHGYELFSAIAHFEPELHKLNTVGIHTIAGIPKEGVIQLTKNSRLRIRLPVDQVRLVYPLAGKSLKIGKHTIRLGIPEIYLLEPAERLRSRIVIIQSYQEPESFLAAAQRQLEQLGIQGKAFITKNTDGSPKRRSIKIKGFTVVGFGLEIINLSNEDSLTLLRYGIGGKRKMGCGVFVPVKRKESAS

SEQ ID NO: 435 - protein, 496 aa, Nostoc sp.
  source 1..496: note = JL31
MGEPNITWIHRAGIAGLWMTLKQLEKLYPIPAKRPGNLSWLLTPRSISLEWQGQDFVVLDWLLKQSFQINEEGLISLTGLNTHSINIETQINIHLGITGTFLQHNQVFKFDGGKSWSLIVDGRKIDIEYKKAVSYAHQHFAKQLCDKQGQLLGQSIGVAGWLYPGSVVRHVAFTKETRFEEKPQLAFALLYALVACHYFVLRSHTKPEHTQYALVIPEVVDLEIYAQEYWNLGNLDYKDFNVSSLGDAALRYLTYETIIELAIPDQVKRCQVILFGTVVWSKQQKTRIEIAVVEATGIINFIYKLSRISFPEYQIIQYKNKNFIISNLFRGTIADNLVKGFPWWANLYTIFKNKSLFKFITNDGAYKMIQNSEWNLESQKLFIKACHEALKKIYAKIYGRTNEGQYAQIERENIRILSQLGRCTNAENFRKFIAEFWGRAGQLSILEKHWEELLPLTSGIMDWKVARDLTFIALASYPKSNMVEKQILEISDSNSE

SEQ ID NO: 436 - protein, 324 aa, Nostoc sp.
  source 1..324: note = JL31
MFHLFGNILTSYGTAANNRGENEGNITPLQKLNWKGEVHTLVSSEAIRWALRYYWQNVGYPVNRRWDENAQPVADHVWQDPNFDDIRFIDDDVLGFMQAEAAKAEASDESGGDAEQASQDENKKISKGKDKQTSPRKGKQKPKGKITARRGVLEVTRAVSMIPFTGDITFNAVSGVKGRNSLYATEIHATRYQYGFALTPDSLKDKSRIHPVLDGLISIGEVAGNHARFLYDFSPESIVLRWTHDFSPRFLYCFEQDELGNLSISNLVRQVEVGDIDPKELWIGGLISHGLEDLGANVFPGVKSAVKALKQVIAEDLQLSSGSD

SEQ ID NO: 437 - protein, 208 aa, Nostoc sp.
  source 1..208: note = JL31
MTTIALKVEVPIACFRQSRAREYAETYPVPPPSTVYGMLLSLIGETDRYKHCGTQLAIALLSKPEKSIVIRTFRRFKTKDIHDPKNAKPDYQELLTNIEFVVWVKTDKAKPTLPELLQQAFANPASINRFGGLCLGESRDLINTVTLLPEKYYGESLWWLVTDEDGSLTLPYWVDHVGSKKTRWQCYELQESQVWQPPDLSWTTIQTS

SEQ ID NO: 438 - DNA, 131 bp, Nostoc sp.
  source 1..131: mol_type = other DNA; note = JL31
ccgcccgtcgcggtttggatgtcgatcagcctcgtaaccttgctaaaagcgttaccgtagaatagtataagtttatacctaaaattaggtgtacaataataataaagtcgtataacaaataaaaaagttat

SEQ ID NO: 439 - DNA, 317 bp, Nostoc sp.
  source 1..317: mol_type = other DNA; note = JL31
gttctttaacattagatgtcgtcagacgttgagcaggctggagcctttgtttccgggtcttgtcctaattgttctttaacattagatgtcgtcagacgttgagcagcggcaacgctgggaaccattgaacccaccgattagttctttaacattagatgtcgtcagacgttgagcagtcaaagtagttaatggtgctcagactgttggatcaggttctttaacattagatgtcgtcagacgttgaacaatgggatatggggtaagcggaacccttggtacagtattctttaacattagatgtcgtcagacgttaagca

SEQ ID NO: 440 - protein, 633 aa, Nostoc sp.
  source 1..633: note = LPT
MLGFFPAPYPDEILYSILARYHIRSGNTSPKITLRELFNSQDVIATVDLPSNLNSLIENLQFISNYQVEDLIYKYTLYPFYSVFLPPKRASQVMDSMKADFGGDIHTRTGIMASSLKMQRYLRFCPKCLEEDLQNYGESYWHRLHQTPGVLVCSVHGMTLQDSTIPMQGFNRHEYYAASLENCPVIPIQETYSQETLKKLRLLAQDISWLINSNLFSRELEWFQRKYIALLIEKNFATATGRVNQKRLLDNFLFFYGAEVLEAVNSMVNYENEQNWLFSIVRKHRKSFHPIRHLLVIRFLTNSIEEFFNTDYQYKPFSEGPWLCLNAAVDHYLKPVITNLVVTHCLDNKKPLGTFSCSCGMVYCRTGPDETDEDKRRIGKVLTYGQFWEQKLKELVEIQKLGLRETARQLKVDSRTVKRYTAILKLKTFWKSSQKNQLVDSQEVLDFNLNLASDDKIKYREVWKALQQQYPEASKTTLRRLGKRTYIWLYRNDKEWLNKNSPSLKVPLPCVGKVDWAERDKQVLEKVKTAVRTFLSAEKPARVTICRIGKSIGLLALLEKHLAEMPLTKVYLESATETVEDFQIRRIKWAIKRLDDCGEEIQPWKVIRLAALRENCSERVQAALKTELYKQPD

SEQ ID NO: 441 - protein, 233 aa, Nostoc sp.
  source 1..233: note = LPT
MIIDCSLPTQIYPESPLNLTKQRKLLTSQLPYIDLIFNLIGETVPLDHGYELFSAIAHFEPELHKLDTVGIHTIAGIPKKGVIELTKNSRLRIRLPMDQVRLVYPLAGKPLRIGKHTIRLGIPEIHLLEPAEKLRSRIVIIQSYQEPESFLTAAQRQLKQLGIQGKAFITKNTDGSPKRRTIKIKRFTVVGFGLEIINLSNEDSLTLLRYGIGGKRKMGCSVFVPVKRKGNAS

SEQ ID NO: 442 - protein, 303 aa, Nostoc sp.
  source 1..303: note = LPT
MSIVASVVNPKIQLNLGDPSITWIHRAGIAGLWMTLKQLEKLYPIPAERPGNLTWFLTPRSISLEWQGQDFVVLDWLLKQSFQINEEGLISLTGLNTHSINIETQINIHLGITGTFLQHNQVFKFDGGKSWSLIIDGIEIDVEYKKAVSYAHQHFAKQLCDKQGQLLGQSIGVAGWLYPGSVVRHVAFTKETRFEEKPQLAFALLYALVACHYFVLRSHNKPEHTQYALVIPEVVDLEIYAQEYWNLGNLDYKDFNVSSLGDAALRYLTYETIIELAIPDQVKRCQVILFGTVVWSKQQKTRI

SEQ ID NO: 443 - protein, 205 aa, Nostoc sp.
  source 1..205: note = LPT
MVEATGIINFIYKLSRIYFPEYQIIEYKNKNFIISNLFRGTIADNLVKGFTWWANLYTIFQNKSLFKFITNDGAYKMIQNSEWNLESQKLFIKACHEALKKIYAKIYGRTNEGQYAQIERENIRILSQLGRCTNAENFRKFIAEFWGRAGQLSILEKHWEELLPLTSGIMDWKVARDLTFIALASYPKSNMVEKEILEISNSNSE

SEQ ID NO: 444 - protein, 324 aa, Nostoc sp.
  source 1..324: note = LPT
MFHLFGNILTSYGTAANNRGENEGNITPLQKLNWKGEVHTTVSSEAIRWALRYYWQNVGYPVNRRWDENAQPVADYVLQDPNFDDIRFIDDDILGFMQAEAAKVEASDESGGDAEEASQDENKKSSKGKDKQTSPRKGKQKPKGKITARRGVLEVTRAVSMIPFMGNITFNAVSGVKGRNSLYATEIHATRYQYGFALTPDSLKDKSRIHAVLDGLISIGEVAGNHARFLYDFSPESIVLRWTHDFSPRFLYCFEQDELGNLSVSNLVRQVEVGDIDPKELWIGGLISQGLEDLGANVFPGVKSAVKALKQVIAEDLQLSPGGN

SEQ ID NO: 445 - protein, 208 aa, Nostoc sp.
  source 1..208: note = LPT
MTTIALKVEVPIACFRQSRAREYAETYPVPPPSTVYGMLLSLIGETDRYKHCGTQLAIALLSKPKKSIVIRTFRRFKTKDIHHPKNAKPDYQELLTNIEFVVWVKTDKANPTLPERLQQAFANPASINRFGGLCLGESRDLINTVTLLPEKYHGESLWWLVTHEDGSLTLPYWVDHVGSKKTRWQCYELQESQVWQPPDLSWTTIQTS

SEQ ID NO: 446 - DNA, 185 bp, Nostoc sp.
  source 1..185: mol_type = other DNA; note = LPT
gtaacggtggaatagtctattaatagaggtagtagtgtgtataacaaataaaaaagttatacaatacataaaaaagttgtacaatttatcctgtaggtgcgtatgtgagtatctacaggagtttttatggctagtgctgattcataataattttgcctttaaaggcttggcttggcttcgcgctc

SEQ ID NO: 447 - DNA, 580 bp, Nostoc sp.
  source 1..580: mol_type = other DNA; note = LPT
atccctcgcaaactcaagctgttgattcagctttgtacttgaaatgcgatcgccactaaactaaaccttggagcaaatattcccaaatccttacagggaagtcttttgcgaaattgtacaacttttttatttgtttttggatcgtagcattatgaaattgtagaactttattttttcaaaacttctcagtacctaacgatataatagtgcttgtagccgcgcaaattgtacaacttttttagttgtttacaaaagaatccaatgcttcatctaactactggctaacccaagaattccctccagtttatctaaaactgtactgacaggcatattgctcaacatctggttcaactgcgtaatatcctgtttgcaagaaagttttgattttttgtgcgatcgcttctagtgtttcttggcttggttgtttcttaagcagacaaaaaagaacacaagggatgcctaagcaatctggcagttaactcaaaggtaaattttttttcgataactcttcattaccctggcgactgtttttttataaaaatctatttttgttcaaaatctaccaatataatccagtttc

SEQ ID NO: 448 - DNA, 764 bp, Nostoc sp.
  source 1..764: mol_type = other DNA; note = LPT
gttctttaacattagatgtcgtcagacgttgagcagctgtctgcaaaactttgctgcgacgcatccaatagcgttctttaacattagatgtcgtcagacgttgagcagcccatctgcgagatgagctagagcaagactgggaagttctttaacattagatgtcgtcagacgttgagcagtttccttggtgggagcgggagtggattggctggatgttctttaacattagatgtcgtcagacgttgagcagaaatggtggttggagcgatcgctcatcttatgcaagttctttaacattagatgtcgtcagacgttgagcagcagaactggcaagacgctctaccaaagcccagaaaggttctttaacattagatgtcgtcagacgttgagcagggggccgcgattgaacgttacgctaaggagcgagaagttctttaacattagatgtcgtcagacgttgagcagggcacacaccttgttttcattcagcttccccttttgtgttgcgttctttaacattagatgttgtcacacgttgagcagtcgtcggctgctcaattggtgcaggaggcaatggcggttctttaacattagatgtcgtcagacgttgagcagctctctaatctgcgaactgcgctgcgattaacagaattgttctttaacattagtatagatgtcgtcacacgttgagcagaaaaatgcgacaagatttgagaacaccataccaagttctttaacattagatgtcgtcaggcgttaagcaa

SEQ ID NO: 449 - protein, 276 aa, Gloeothece citriformis
  source 1..276: note = PCC 7424
MARSRREWTQAKFERYWEEGRGQGTLKNYVPWIKIQDFPSGGRSHRIPGWKTGRIHHLLSDHEKRSFYLFEWSDAVVDIREQYPLNDLDLALSIADEMNIKYPEDSEHQIPYILTTDFMITIEQEGKTVQMARTVKSTKDLEKKRTVEKLELERRYYQALNIDWGIITEKGISKIFASNVEWIHPNYHLESTSNADIVELRRIASTLKEKLLVENTTVTQITTTLDKEMNLETGTSLYLFKHLVARKEIIVDMLSSKISSNLSTQSLQKIVRDEYK

SEQ ID NO: 450 - protein, 624 aa, Gloeothece citriformis
  source 1..624: note = PCC 7424
MITEYNQGRQDNKLVAITVYKYLRKFWQRGKVKNALLPDYVNSGGKGKRRKAGSQKRGRPRKYKHDPEIGEGINITEQDRQIFRIAINKFYRNQKQNSLMTVYKLMIKNYYAEEFHYNENNVKFSVLIPPEKQPTFTQFRYWYETENSNLEKTITARRGAKRFALEHRAILGTSKQETIGPGSRYQIDATVADVYLVSQYNRDWIIGRPVIYVIIDVFSRMIVGVYVGLEGPSWLGAMMALSNVASDKVLFCQEYGLTITEEQWPCHHIPESILGDRGELAGMTVETMIPNLFIRIENAAPYRADWKGLVERHFKVIHEQVKPFLPGFVDKDFRQRGARDYRLDARLDINQFTEIILELIFYHNAHELKTYNRDEEMIADDVPPIPLELWKWGIMKRSGKLRTINEDIVKLNLMPSAQARITERGIRFKSMYYTCEKAINEMWFEKARSQMLSKSEKSLSISYDPRKMDFIYLRSPDGRDFEKCFLLDPDERYTHKTIYEVEYLLAYEDLQKRKREGEQLQNEVDLMAKIESIASRAQQETEKYQDKSESNKQKNSGIREHRAQEKAQRREVEAFELKSDNKPSSPQKIEKSKPESKQSHSSNSSQPNHLDLLAQKRQERKRGK

SEQ ID NO: 451 - protein, 568 aa, Gloeothece citriformis
  source 1..568: note = PCC 7424
MESNDFINKYSYYDWTNIPNGTQAAVAKYRQFKQVEYNNNPMIETLPPILSQEQFIELVAQYPIHNYAERQLEAHERFHFIERLSRYFDPLSKTVDLQQTLSVLLMSGYISRNPLQPEYARRSRQIYNSIQAKDGQNLENYVTVSTALTTASGLTIIGESGLGKSTNLANILDLYPQVIIHPQHSVTQIVWLKVDCPHAGSLKGLCTDIFLSVDRLLGTNNFKKFGSKSNSEDYMLAQVAQIAHTHHLGLLVIDEMQNLANSRRGRDDFLNFLVKMDNIIGIPVIRVGTNEAEPILTGNFRNARRGTGEGAVRWKRMENEENWQFFVEGMWEYQWTKTEVIYSEEISDALYYETQGIIDILIKLYKMVQWRAISLGKDEIITVDLIHQVAQEGLYLVKPMLDAIRSGDLVEMKKYRDIAPVDISFYREKCLNEINFDDLSEMRRTRRNQNNKSAMSPLLKQVIVELLDLEIDPSQAKALGERVVSENPQETDIFKLVNQAYKIALQGEPFKESMLNKRKLNGKFNPNYTEYDMRKILEEAKKKQVSVYEPFVESGIIKDNPEKDFFLI

SEQ ID NO: 452 - protein, 295 aa, Gloeothece citriformis
  source 1..295: note = PCC 7424
MLYFFPIPYPDELFYSMVCRYHVRSGNRSFRQTQLDLFETAGTKQYYLGLPNNLATLINQLPFGSSLTLNQLLEKHTLFPYYQTFLTNREVKRLRELMEGKESKSIAQVAKIPKLKLYYPDYLRFCPQCLAEDLQQYGETYWHLEHQFPGIKVCLNHRVGLQNSRVLVEEMGKGFMAADEENCVGDGVSYDGEVLQGLWVFGKVIEGKMRERRGFKGLEGLRDEYKQGLMKLGLLEEERLVAAMLERYGEGVLRLIHPEMMENLGEYVSGCLLGCDLLQEVDRVVHWFVEGIILT

SEQ ID NO: 453 - protein, 214 aa, Gloeothece citriformis
  source 1..214: note = PCC 7424
MLAHNSPLPNPYIDLKFPVSGHTIPLNHGYPLYSAISHQFPVIHDLTTLSIHPITGKPEFPQLLHLTEDSYLCLRLPINQVPLIYRLAGKTLTLNKHKIRLGLPESQIITPHHHLYSRIVIIRGFDEPHAFLEAAQRQLNQRNISATLNLITRPEGEPIRRTIEIKGKTLIGYGVKISDLSKQDAISLQEQGIGGKHKMGCGVFTPVKHKPNKK

SEQ ID NO: 454 - protein, 573 aa, Gloeothece citriformis
  source 1..573: note = PCC 7424
MMDTSTQPKIHLHLHAPDTTLIHRAAIQGLWMTLKQLETRFPTPSQRIGELSWKLTPYSVSLDWKGQDKRVLDWLLKQAFQVDKRGLISLTGLNPQTIPLINKIHLHQALTATLLQHNRFVTTIFDPYKVSGINLYKTPPYLLLNLLIKLLNPGQFYLLLKGKPNPQASIKVKAYKAELELNYKQLSAYIHQNFSHQLCKSKTHQWIDGYIPIVSWLYPGAIVRHQTIRQYNQCKERTEYAFALLFLPIACHYLILSKGINEQMKSKKKNPAKYLLVIPDPINLEESAQIRWRLNFTNYQNLYVSSVEEGALSYYGKEITQNFSPQRCQIILYGKLMKKSQLRNPIDIQDFKITKIALKTYQLACCYLQENKIIKTEKNFLVRLNLIRGMISKNLLDKQPIWRNLWSILKERDSYGEMRQQLKYNQQGLFTMIKNSDEISGSHHAFIDVIHEALKIIYAQIYQDNPSAASKKIERENERLKSKLLDCYKEETFRHLMAKLLSKAGNLPTLNKNRRLVLPILTGKIDWKEARDITLIALSSYPTQARLNRELLIFFVFPLLLDAQLYQLALIIL

SEQ ID NO: 455 - protein, 286 aa, Gloeothece citriformis
  source 1..286: note = PCC 7424
MRYLFGNLLTHYAPASLNRGEHDGNEQLIQQILWQDEPHTTISPFSVRWNVRYQFQEQGEPVYEKWDKVQRIRIPQGKAHNPNSYIDDDVMGFMVTEAAKKNQKGTSNARQGALGTNRAISLTPYDGTTFNYYNSREKDNLSVHSTNFHNTCYQYCFALDSQHLENQSRILNVIDAFIYLGQVGGHYNESLFDFSPESLVFRWTKDNCPRFLYCFEQDENKQVIAPKLIEKVESEDIEAEELWIGGEITKRLTLENAHTFRGIKATAKDLKRKISEDLKFPSKEPK

SEQ ID NO: 456 - protein, 209 aa, Gloeothece citriformis
  source 1..209: note = PCC 7424
MKSVAIYIDVPVATFRQSHGREYGKTYPYPPHSTVYGLLLSLVGEMDLQKHCGVQLAIAMLSQPAKSKILRTIHRFKFKKEDHEGNQRPDYQEILTDIRFIVWVKSAEDKNNPSLPERLEQALLNPDSVKRWGVLYLGESDDLVNNIKLVTENFSVKSREWLLKDDSGEITLPYWVDHFGFQGTRWFRYRLEAITCSTPPESAWITIQT

SEQ ID NO: 457 - DNA, 184 bp, Gloeothece citriformis
  source 1..184: mol_type = other DNA; note = PCC 7424
agcccagaaatttagctaaaagtgttacagttgaatgattatggtaattataggttgggttaatgtaggaggataataaagttctataatttataataaagtcctataatttataataaagttgtataattatggttagcttataagtttaatcataacagggctgtatggctagaagtaggcg

SEQ ID NO: 458 - DNA, 448 bp, Gloeothece citriformis
  source 1..448: mol_type = other DNA; note = PCC 7424
gcttactatctccgagaacatttgatccgttctgttaaaattctttagcccaacataaaagttgtaagtatatatttctgtaggtatccgagatgaatgcagtatttatagtagtgatttagcttaaaatgaaattaacgaacatttaacttacactcattacacttgtcaagcatgatgttgctaccctctcaaattatacaactttattattcgacaaaaggaggaatctgaactaagctatttatcaagccaacgaaattatacaactttattttttaggattctaggttagataacgagaaatcaaaaggttcatcgtaggaaattatacaactttattattttcctacagttaacaaaacttaacaattctaattttttgtttcaatctaacctacttccagaaaaaatgaaaatctatcaattagttcttgacactaacata

SEQ ID NO: 459 - DNA, 322 bp, Gloeothece citriformis
  source 1..322: mol_type = other DNA; note = PCC 7424
ttttgaggtagcttgagcaggtgcttgtaatattgtgattgagcatagttcacaacaggcttttaaagtgtggagtgatttatagcttgatgtcgtaaggcgttacttacaaagatttgtgcggcgtgtttcctcgtgaagctttacaaggtgatttatagcttgatgtcgcaaggcgttactcacaacattgtaccaagaatttatgtggcctgtctcgtgatttatagcttgatgtcgtaaggcgttactcacccattctttacgttttttacctcgtttatcagttgtgatttattgcttgatgtcgcaaggcgttatt

SEQ ID NO: 460 - protein, 929 aa, Nostoc sp.
MLSDIEFEHWCRRLNLSEQARKVIEQIRTSEPSRRVGGGKKNVSGRYPSSKMGVSIQFESHRNELAHIYKLETDDDVLEYYDQPPPIFLDYLSKNGRRNYHSHTPDFFVIRKSAAGWEECSVEQNLLKKVQDSPNRWQRQEDGTWICPPGKEYAAQFGLYYVVRSSAEINSIFLRNFVWLEDYLNNQQLTVDDEITDAVCNLVKLQPGISLANIIYQIKEASIDDLNTLIATNQVYVDLNTYLLAQPEKVKVFLDEEEAFTFNQITKVSEPQAINKLGIFKASVGTSIFWDGSKWEIANTGEKSIALITQDGKFIDLPNHVFETLVRDKKITSLQTPEEPTINSEVEELLRKASTEDRKEATSRYKAIEAFLNGNSSNKPNRSQRRWIASYRKAEKTYGRGFIGLLPKHRDKGWRRQGIPEEVLLFMQQHIEINYENIKQHSIRHAYQSFKDLCNEKGYKPPSSESYRQAVRNRPQYKQIQKRMGDRAAYKEEPFYWYIHREETPPHGDRPFEICHIDHTEVDVELLSAIMLKLGMDISVIKEKASMGRPWLTLMLDAYSRRIIAAYMTFDSPSYRSNMMILKMCVQRYGRLPQIIVVDGGADFGGTYFETLLAYFRVTKKERPAAKARHGSVIESYFGVADKEFWHNLMGNTQITKNVRQVTKSVNPKNNAVWTLAKLYSYFCEYCYEIYDTCPHPALRMSPREAFNIGTARSGSREHTFINEEEFKFLALPSPTDSAGTRKITQEGVKINYLYYWHSCFSRFRNIKVEVKYDPFDITQAYAYINGEWVKCHSRYLRELEGHSERELMIAAAELKKLNRIQNKQFSDITGKKLAEFFRRIEMEEAALAPPWLEAKKAVLQQRLRDSELKQVHAQIEGKIDESETITSTNVENSAFIKAEHLTKQFTESSQQELDDENLVESFEPLEEW

SEQ ID NO: 461 - protein, 394 aa, Nostoc sp.
MSGQYRFPLELLEQPPQKRLQFFKNPGVTIMHHNLKNAFYKLHRIIREPAGSSIILVIGPSGVGKSTLLQLLKNKIIEESLGQMEADPGWIPIVCVEAPAPAKGTFRWKIFYRKILEAVDEPGIDQKINYNSDGIRRDSDGKLAFGAKATEDSLRLAMEKALIHRRPYTLSVDEFQHIGKMASEQLLQAHMDCVKSAVNTTKIPWTGFGTYQLLNFLELSPQLSRRTKIMHIPRYLLEKDEDIQEFKRVLEHLQYRMPLQETPPLKEKYWEFCYERSIGNIGTLKNWLTDAYDLAVFEDANTLTLEHLQETAKSSSECEQMALEAIEGEEKLTDSQDKSKSLRTILGLAKDETQNSNKSSTHVQEHNQKSQKSSNKTKAFKRNPSRDPVRGEPV

SEQ ID NO: 462 - protein, 455 aa, Nostoc sp.
MNINISSELRELRKSQLPTRSRLYHLKPIGVGTSTVESLTSYITRLAVSHCLPTGVLMVTEIAPVINKTYGAGTLHRIYNFTGALNGTGVMASDLVQALENLTQQKNLHFLTLLTWAEILPSRNLLRRHRAWCSFCYQEWYENGQTIYEPLLWTLDVVKVCLRHQQPLTQKCPHCKEKNFHLAWRSQPGYCSKCLKWLGLNVETQLSNCPYSHKDELEFEIWITNTLGELLAKSPHLTLSPSKDNISKAICAYVDKVAEGNIAAFARQLQVPRNTVWLWCKGQNLPSIKAVLHVCYSLRISLLDFLNFEEDLVDSLSTLRLPLPQTKANRKKSIKPFEADEVKQNLEAVLESNEFPAPSMEEVARRLQCDRRSIFKYFPDLCHAISSRYLSDRKAILENKIEQCCEEIRQITLNLHNQGIYPSEKSVSEQMTMPGYLRYRKVRLALQEIQSQSGR

SEQ ID NO: 463 - protein, 329 aa, Nostoc sp.
MTIYLEHWSIIPLEIPQRSRLFSLEPVAVGTSYAESLSSYLHRLAQAHCLTTQKLVMGEIAPLILKDEEKSELLAKNLSHLLGNRDAKPAINGMREMTGKLVTVLEELTMRQDLRFLTLLSWKGMIYDKGLFRNYRAWCPCCWEGWKQENKTIYEPLLWSFKDIEFCLIHKQRLIEECPHCGSRLPMMARFSPAGFCSHCYGWLGQEIKGEEEIEKYRVNIQGISELIALTPELGYKPIPIELTRKLQLILLVFEQAIGKDLQLLGDLGGIMESLRIASKTNQSQPYHLVKLIIPVCEKAKISVSQLFGSDFKELGKILFGNFRLELKL

SEQ ID NO: 464 - protein, 220 aa, Nostoc sp.
MTAILLQSEEYVDLTFKLRGALIPLDNGYVIYSALSRICPILHELKSIGIHPIAGIPTKNNLLELTTQSRLKIRIYHQHIPLIYPYLAGQAFHIGQNFYQLDIPDYKPLISSESVYSRLVIIKGFQDATNFIEAVQRQLDNLGIQGKIELLTRQDGTPQKRQLTINKEGKQFKIRGFGVKISELNPEDSLTLQEQGIGGKRKMMCGIFVPATRSKEEEET

SEQ ID NO: 465 - protein, 324 aa, Nostoc sp.
MVATQPKISLSLDAADTTIMHRAGMTGLYMTLKRLEKQYTSSRQRGGHISWFLTADTIKLFWEGSDFVALSWLIKESFQLDDTGLIHLTALSNAAIDLRQKIHIHEGICAVFLRHNQFYQAGKIVNAELTVEEKKVEYRYKSLTWYAHQTFAEKLCEADTQQLREDYVQMTSWLYLGGIVRHARTQNTTKLEEKPEYALALLFVPVVCHYCLLHIPSEDLKEKKPHRYGVVIPEINDFEDASQRRWRLQQLETKQLNVSSLGEAGLLYYSLDDIQPEGGYYQACQVWLYEKMNKDSRQRTLMSIEEIEVDKNTLITYQQVQKYF

SEQ ID NO: 466 - protein, 172 aa, Nostoc sp.
VNPIRSIIADNLVKGIHWWSDFWEKLVIEDSNEYLFNQLFFNREGFIIMAENSEEDKHYLIFLKVFQQAMKGNFAKMYAKAEAGKDPPIKKKVERLRAELNYCYDELSFKEYLSDFLVRGGLNKYFNQHQEEIALLIKKIPWQELRIWSLLAIASYKPKDKPIEMNDESEEE

SEQ ID NO: 467 - protein, 322 aa, Nostoc sp.
MMSQKKNDNNIPNYYLYGTVLTRYGLASLNHDMRRGNKTTLQKGYWNGKIHSFVGANAIRWALRFYLQKQGYLVNRVWDEDEHINRLTSEDFDPEEFYDDDIFGFALLESAETEEETSTTKKKKKQKTVSSPNQRIGALAMNMAVSLTPYDGAVKLGAKSGRDKDSTSLHFTEYHATRYQYYFGINPTHLKEMSRILPLIDGIMDMPKVGGSSNIFNYSFCPDSLVFQWTNHFASYISYCFEYCDPKTKEAKLAQEFIDEVECGQIDPSTLWIGGTIVKELKQLDNFDNSPFNRAHIYRNRNELVEALKAVIKRDLGLQESK

SEQ ID NO: 468 - protein, 212 aa, Nostoc sp.
MIAPLILYLDVPFATFRESHAREMGKTYPVPPPATVYGMLLSLVGETDVYRHCGVELAIAMLSSPKKSRILRQMRRFKNADFSHPENVIPCYQEILSNVKCLIWVRSDGEKIELSLRERILLAFDHPELVRRFGCLFLGESDQLIKTIKLVSQDYPEGVRQWAIRDNRGRLTLPYWVDHVGSRNTRFLRYRIEEMPSSLPPDLAWTMITSPI

SEQ ID NO: 469 - DNA, 194 bp, Nostoc sp.
  source 1..194: mol_type = other DNA
tttttataaagttaggttccataggtattgtttgcgacaacaaccttaagttgtcctgattggtcactttatgcttgtgatactctctggtcaacttatgcttgtcaaatgttgcactccgcagtgagttaggtattagcaaacagaaatgagaggtaattattaagtcagcagagattttacctaaattttag

SEQ ID NO: 470 - DNA, 433 bp, Nostoc sp.
  source 1..433: mol_type = other DNA
cagcgcgaccagcagaccatcgcatcaagcccaatttccgcaagcatataattttgcagttttattttaggagcgatcgcactcacgagagaattagcatctggcttattcagatgcaaagctatgtttacatcacacagttaattaaatgtgaatttatggatttttaatttataacttttggtcaactaatgcctagtattttcacattaggtcaattaatgcttgtcaatagtttttttgctatgatcgccctcacgaaagaatgaggctttgaaagcatatcttggtcaactattggttgtcatttaggacaacttatagttgttgtcgcattgttgaaagcataaagcttatgctttcgattcaaattgctaatattagatcgtcaatttttgtgagatggaagttaatataattcctaatctccaac

SEQ ID NO: 471 - DNA, 238 bp, Nostoc sp.
  source 1..238: mol_type = other DNA
ctactctcctaatagaaatcctctctggtataggagcgtaagtagcgatcgcactccatcttaaaccagtgggcgatcgctttgagcaacgcctaacggcatcaagccacgaatcacctaaaagccaagttggcttcaaacatcgcaattttctcttgagcaacgcctaacagcatcaagccacgaatcacagcaaaggtgaaaacccttaacacaggaagcttcatttacaatctta

SEQ ID NO: 472 - protein, 929 aa, Nostoc sp.
MLSDIEFEHWCRRLNLSEQARKVIEQIRTSEPSRRVGGGKKNVSGRYPSSKMGVSIQFESHRNELAHIYKLETDDDVLEYYDQPPPIFLDYLSKNGRRNYHSHTPDFFVIRKSAAGWEECSVEQNLLKKVQDSPNRWQRQEDGTWICPPGKEYAAQFGLYYVVRSSAEINSIFLRNFVWLEDYLNNQQLTVDDEITDAVCNLVKLQPGISLANIIYQIKEASIDDLNTLIATNQVYVDLNTYLLAQPEKVKVFLDEEEAFTFNQITKVSEPQAINKLGIFKASVGTSIFWDGSKWEIANTGEKSIALITQDGKFIDLPNHVFETLVRDKKITSLQTPEEPTINSEVEELLRKASTEDRKEATSRYKAIEAFLNGNSSNKPNRSQRRWIASYRKAEKTYGRGFIGLLPKHRDKGWRRQGIPEEVLLFMQQHIEINYENIKQHSIRHAYQSFKDLCNEKGYKPPSSESYRQAVRNRPQYKQIQKRMGDRAAYKEEPFYWYIHREETPPHGDRPFEICHIDHTEVDVELLSAIMLKLGMDISVIKEKASMGRPWLTLMLDAYSRRIIAAYMTFDSPSYRSNMMILKMCVQRYGRLPQIIVVDGGADFGGTYFETLLAYFRVTKKERPAAKARHGSVIESYFGVADKEFWHNLMGNTQITKNVRQVTKSVNPKNNAVWTLAKLYSYFCEYCYEIYDTCPHPALRMSPREAFNIGTARSGSREHTFINEEEFKFLALPSPTDSAGTRKITQEGVKINYLYYWHSCFSRFRNIKVEVKYDPFDITQAYAYINGEWVKCHSLYLRELEGHSERELMIAAAELKKLNRIQNKQFSDITGKKLAEFFRRIEMEEAALAPPWLEAKKAVLQQRLRDSELKQVHAQIEGKIDESETITSTNVENSAFIKAEHLTKQFTESSQQELDDENLVESFEPLEEW

SEQ ID NO: 473 - protein, 394 aa, Nostoc sp.; identical to SEQ ID NO: 461

SEQ ID NO: 474 - protein, 455 aa, Nostoc sp.; identical to SEQ ID NO: 462

SEQ ID NO: 475 - protein, 329 aa, Nostoc sp.
MTIYLEHWSIIPLEIPQRSRLFSLEPVAVGTSYAESLSSYLHRLAQAHCLTTQKLVMGEIAPLILKDEEKSELLAKNLSHLLGNRDAKPAINGMREMTGKLVTVLEELTMCQDLRFLTLLSWKGMIYDKGLFRNYRAWCPCCWEGWKQENKTIYEPLLWSFKDIEFCLIHKQRLIEECPHCGSRLPMMARFSPAGFCSHCYGWLGQEIKGEEEIEKYRVNIQGISELIALTPELGYKPIPIELTRKLQLILLVFEQAIGKDLQLLGDLGGIMESLRIASKTNQSQPYHLVKLIIPVCEKAKISVSQLFGSDFKELGKILFGNFRLELKL

SEQ ID NO: 476 - protein, 220 aa, Nostoc sp.; identical to SEQ ID NO: 464

SEQ ID NO: 477 - protein, 511 aa, Nostoc sp.
MVATQPKISLSLDAADTTIMHRAGMTGLYMTLKRLEKQYTSSRQRGGHISWFLTADTIKLFWEGSDFVALSWLIKESFQLDDTGLIHLTALSNAAIDLRQKIHIHEGICAVFLRHNQFYQAGKIVNAELTVEEKKVEYRYKSLTWYAHQTFAEKLCEADTQQLREDYVQMTSWLYLGGIVRHARTQNTTKLEEKPEYALALLFVPVVCHYCLLHIPSEDLKEKKPHRYGVVIPEINDFEDASQRRWRLQQLETKQLNVSSLGEAGLLYYSLDDIQPEGGYYQACQVWLYEKMNKDSRQRTLMSIEEIEVDKNTLITYQQVQKYFQTNYQQIKPKQIFIKVNPIRSIIADNLVKGIHWWSDFWEKLVIEDSNEYLFNQLFFNREGFIIMAENSEEDKHYLIFLKVFQQAMKGNFAKMYAKAEAGKDPPIKKKVERLRAELNYCYDELSFKEYLSDFLVRGGLNKYFNQHQEEIALLIKKIPWQELRIWSLLAIASYKPKDKPIEMNDESEEE

SEQ ID NO: 478 - protein, 322 aa, Nostoc sp.
MMSQKKNDNNIPNYYLYGTVLTRYGLASLNHDMRRGNKTTLQKGYWNGKIHSFVGANAIRWALRFYLQKQGYLVNRVWDEDEHINRLTSEDFDPEQFYDDDIFGFALLESAETEEETSTTKKKKKQKTVSSPNQRIGALAMNMAVSLTPYDGAVKLGAKSGRDKDSTSLHFTEYHATRYQYYFGINPTHLKEMSRILPLIDGIMDMPKVGGSSNIFNYSFCPDSLVFQWTNHFASYISYCFEYCDPKTKEAKLAQEFIDEVECGQIDPSTLWIGGTIVKELKQLDNFDNSPFNRAHIYRNRNELVEALKAVIKRDLGLQESK

SEQ ID NO: 479 - protein, 212 aa, Nostoc sp.; identical to SEQ ID NO: 468

SEQ ID NO: 480 - DNA, 194 bp, Nostoc sp.
  source 1..194: mol_type = other DNA
tttgtacattaaataattattgtcagttttaaatgcgacaacaaccttaagttgtcctgattggtcactttatgcttgtgatactctctggtcaacttatgcttgtcaaatgttgcactccgcagtgagttaggtattagcaaacagaaatgagaggtaattattaagtcagcagagattttacctaaatttta

SEQ ID NO: 481 - DNA, 508 bp, Nostoc sp.
  source 1..508: mol_type = other DNA
gatgttggacggcataataatttgccagcgcgagcttcttgcaggtcttttttcagcctatcagagaagctacagcgcgaccagcagaccatcgcatcaagcccaatttccgcaagcatataattttgcagttttattttaggagcgatcgcactcacgagagaattagcatctggcttattcagatgcaaagctatgtttacatcacacagttaattaaatgtgaatttatggatttttaatttataacttttggtcaactaatgcctagtattttcacattaggtcaattaatgcttgtcaatagtttttttgctatgatcgccctaacgaaagaatgaggctttgaaagcatatcttggtcaactattggttgtcatttaggacaacttatagttgttgtcgcaaattgttgaaagcataaagcttatgctctcgattcaaattgctaatattagaccgtcaatttttgtgagatgggagtcaatataattcctaatctccaact

SEQ ID NO: 482 - DNA, 181 bp, Nostoc sp.
  source 1..181: mol_type = other DNA
ttgagcaacgcctaacggcatcaagccacgaatcacctaaaagccaagttggcttcaaacatcgcaattttctcttgagcaacgcctaacagcatcaagccacgaatcaccactcaaaaactgaaataacaccagtccaaactatttgagcaacgcctaacagcatcaagccacgaatcac

SEQ ID NO: 483 - protein, 900 aa, Nostoc sp.
MKEQFEQWVARLQISEAGQKIIEKVRSSEPSRRVGGGSKNVSGRYPSRKMGVTIQFESHRVELPIIYQLEHDEDVLEFYDQPPQIKLDYQASNGRRLGVLHTPDFFVIRTNSAGWEECKTEQELKKLAEKNPNRYFYFEEDNQWHCPPGEVYAHQFGLYYRIRSDREINWVVQRNLQFLEDYYRAESLAVEEAIAQSLLAIVSSQPGIVLAELLNQPTGAKSDDIYTLIAQEQIYFDLNAAPLAEPERCLIFRDEQTANAYRLIVEKPSVNLPAISPVINLATGTPVSWDGKGLNIIHVGETEVILGAENNQLIELKKAVFENLVRQGKITSLQTPENTAISTESWQRFYQASPEDQAEALERYKTIEPYLNGHPPENETIPARTIRDWKAKYLTALQKYGCGYIGLLSHRSVKGNRQRKLPEDTLAIMERFILEDYETLKQKRMLEVYGALVLACEQSSVIAPSYKAFTKEVKRRTGYEQTKKRQGRRAAYQHESFYWELTQKTPRHGDRPFEIGHIDHTQLDVELVCSRTGRNLGRPWATFLVDAYSRRLLAVYVTFDSPSYRSCLMVLRICVQRHGRLPQIVVVDNGPEFDSKYFEILLATFECTKKQRPPAKARFGSVCERLFGTSNTQFVHNLLGNTQITRNVRQVTKSVNPKNQAVWTLGLLYEYLCAWAYEVYDTDEHPALFQSPRDAFAAGMVTSGSRLHRMIPYDENFQILTLPTTSEGKAKVQVGRGVKINSIYYWSNSFRDPQIENTSVPTRYDPFNIGIAYAFVRGQWVQCISQYYSQLQGRSEKELKLASAELRKRQQNYGRQSQVSAKNLAEFLTSVEAQETLLEQRSYDAEAREVFIVIEGGKAATSRNEQPKLIQVPFENTDTQVAEDEAIAPETLVVYEEFSL

SEQ ID NO: 484 - protein, 383 aa, Nostoc sp.
MTQTNGFPLELLTRPTPERLAYFENYTVGHPRLKEVSEILMRTIAEPAGASFIFVYGPSGVGKTTLRLRVEQKLTELVLPLLESDRGRVPVVGVEAVAPESRNFNWKDYYTRALIALEEPLIDHKFDYGVRGISRDNFGKINVESKVVAPALRRALENALIHRHPDVFFVDEAQHFGKMASGYKLQDQLDCLKSLANMTGILHCLLGTYELLTFRNLSGQLSRRSVDIHFRRYCAENPEDVQAFKSVLLTFQQQMPLAEAPDLVSHWEYFYERTLGCVGILKNWLTRALKDALDREATTVTLKDLQKRAWSVAQCQRMFKEIQEGERQLSETETDIQNLRSALGLGAKPIVLPEETPKTTRPPAKVGKRKPKRDPIGVQQDVS

SEQ ID NO: 485 - protein, 386 aa, Nostoc sp.
MLANGLVTYESWDLKQLSIPSRSLLYQLQPVGIRTPMVESLIWCEIIPTRNLFRTQSAWCAVCYEEWSLNNQVIYKPLLWTINSVKVCALHKICLCLQCPHCQQELPLLSWRSRPGYCSKCGGWLGMNLPVKSASELMACSTLSKEELHSQTWIVEVIGELISSTLSFKSPPVKEEIAKSLSLVIDAVTDGNIAEFARLMGIPKNTLWMWQTGKALPVLDILLKICYRLEISLLDLLKPEQLAAKSFTKISHKTIRRSPTLRASPKLFDANQVQDALLAILASDKEPPLTMEEVATGLGYDRRTIFRHFPDLCRAISAKYRSYGKACHTEKIQQSCREVKQIVLKLHHQGEYPSEARVSEIMTNPGYLRYKQVRAALNETRHEIGF

SEQ ID NO: 486 - protein, 335 aa, Nostoc sp.
MVNPRGMTIYLEHWNLKPLEIPQRSRLFSLEPVAVGTPYAESLSSYLHRLAQAHCLTSQKLVMGEIAPLILKDEDKSELLAKNLSHLLRNSDAKPAINGMREMTAKLVIVLEELTMRQDLRFLTLLSWKGMIYDKGLFRNYRAWCPCCWEEWMQENKTIYEALLWSFKDVEFCLIHKQRLIEECPHCGSRLPVMAKFSPAGFCSRCYGWLGQEIKGEEEIEKYQINIQGISELIALTPQLGYEPIPIELTRKLQLILLVFEQAIGKDLQLLGDLGGIMESLRIASTKNQSQPYHLVKLIIPVCEKAKISLSQLFGLDFQELGKILFGNFSLELKL

SEQ ID NO: 487 - protein, 220 aa, Nostoc sp.
MAAILIQSEEYVDLTFKLRGAPIPLDNGYVIYSALSRICPILHELESIGIHPIAGIPTRNNLLELTAQSRLKIRIHHQQIPLIYPYLAGQAFHIGQNSYQLDIPDYKPLISSESVYSRLVIITGFQDSTNFIEAVQRQLDNKGIQGKIEFLTRQDGTPQKRQLTINQKGKQFKVRGFGIKISSLTPEDSLTLQEQGIGGKRKMMCGILVPATHSKEEEET

SEQ ID NO: 488 - protein, 525 aa, Nostoc sp.
VFATQPKISLSLDAADTTIMHRVGMTGLYMTLKRLEKQYPSSGQRGEHISWSLTADTIELFWEGSDFVALSWLIKESFQLDDTGLIHLIGLDNDAIDLSQKIHIHEGICAVFLRHNQFYQAGEIVNTELTVEEKKVEYQYKSLTWYAHQTFAEKLCEVDTQQLRQDYVQITSWLYLGGIVRHARTQNTTKLEEKPEYALALLFVPVVCHYCLLHIPTEDLKEKKPHRYLVVIPEIKDFEDASQRRWRLQQLEAKQLHVSSLGEAGLLYYSLDDIQPEGSYYQACQVWLYEKMNKDSRQRTLMSIQEIEIDKNTLITYQQVQKYFQTNAQKIEYKQIFIKVNPIRSLIADNLVQGLYWWSNFWEKLVMEDSKEYLFNQLFLNREGFIIMVENSEEDKHYLIFIKVFQQAMKSNFAKMYAKAEEGKDPPIKKKVERLRAELNYCYDELSFKEYLSDFLVRGGLNKYLNQNQAEILLLIKKTPWQELRIWALLAIASYKPKEKTINKDDSLTPNNQKLEEVNDDSEEE

SEQ ID NO: 489 - protein, 322 aa, Nostoc sp.
MMTLKKNDNNIPNYYLYGTVLTRYGLASLNHDMRLGNKTTLQKGFWNGKTHSFVGSSAIRWALRFYLQKQGYLVNRVWDEDEHLNRLTSEYFDPEQFYDDDIFGFALLESAETESETSTTKRKKKQTKTSTSNQRRGALAMNMAVSLTPYDGAIKLGAKSGREKDSTSLHFTEYHATRYQYYFEINATHLKDYSRILPVIDGIMELPKVGGSSNIFNYPFCPDSLVLHWTNNFASYISYCFEYCEPQSKEAKFTQEFIDEVECGQIEPSQLWIGGTIVKDLQQLDNFDDSPFKKAHIYRNRNELIENLKTVIKKDLGLEESK

SEQ ID NO: 490 - protein, 212 aa, Nostoc sp.
MTAPLILYLDVPFATFRESHAREMGKTYPVPPPATVYGMLLSLVGETDVYRHCGVELAIAMLSIPKKSRVLRQMRRFKNADFSHPENSIPSYQEILSNLKCLIWVRSEGEKIQPSLRERIQLAFDHPELVRRFGCLFLGESDQLIKSIKLVSQDYLQGVRHWAIRDNRGRLTLPYWVDHVGSRNTRFLRYRIEEMPSSPPPDLAWTMVQSPI

SEQ ID NO: 491 - DNA, 174 bp, Nostoc sp.
  source 1..174: mol_type = other DNA
gttacgtccatttgttgtacagtgactaattatttgtcgttgtgtgactttacccataactttgccgcaacggcaagcttatggttccaatagagggcggcaaagttatgcttccaattttccatatatacagaaagaagctaactaagtctaccctttttaagtttaatagct

SEQ ID NO: 492 - DNA, 495 bp, Nostoc sp.
  source 1..495: mol_type = other DNA
gagggtttgcagcttttaccagcataaacaatgatgcaatttaaatgacgattagcttacttgctagacaaaattcttcacctgacccgtcttctagtttatccgtaccactttgtcacaatttagatgcgtttgccctgatggttccagtagtggcaaagttatgggtaaagtcacaatttttcagatagtctaatgaatattgattaaataacaagcgctttgtttgtcctttcccccattccctatgctgtaaacgctttgcccataggcttcttgggcataaacatttgtgacatcatttgatttaaaaacatttagataataatcaagagcctaaaacctgaaaagtctttatgagtgaggattatgacgattaagattatgtatgtcaaccatgacaacaattatttaaattggacaaaaattatttaatggacagtaatatacttgtcgatgaactacttttttgcacgttaacaaaataattagtta

SEQ ID NO: 493 - DNA, 248 bp, Nostoc sp.
  source 1..248: mol_type = other DNA
ttgagcaacgcctaacggcatgaagccacgaatcacacgcactcataggggcaatagtcagcgtcaatatgctgagcaacgcctaacggcatcaagccacgaattacgcgagactagcagtcggggatggctgcaaagaaccctgagcaacgcctaacggcatcaagccacgaattactaaccactaacatcgggtaattggcaggcttcatctgagcaacgcctaacggcatcaagccacgaattac

SEQ ID NO: 494 - protein, 898 aa, Nostoc sp.
MKEQFEQWVARLQISEAGQKIIDKVRSSEPSRRVGGGSKNVSGRYPSRKMGVTIQFESHRVELPIIYQFEHDKDVLEFYDQPPQIKLDYQASNGRRLGVLHTPDFFVMRTNSAGWEECKTEQDLKKLAEKSPNRYFYSEEDNQWNCPPGEDYANQFGLYYRIRSDREINWVLQRNLQFLEDYYRSESLVVEEAITQSLLAVVSSQPGITLAELLNQSTGAKSDDIYTLIIQEQIYIDLNATPLAEPERCLIFRDEQTASAYRLMVEQPSVNLQAISPVVNIVTGTLVSWDGKGLNIIHVGETEVILGAENNQLIELKKAVFENLVRQGKITSLQTPEKTAISTESWQRFRQASPEDQAEALERYKIIEPYLNGHPPENETIPARTIRHWKAKYLTAIQKYGCGYIGLLSHRSAKGNRQRKLPEDTLASMERFISEDYETTKQKRIWEVYAALVRVCEQSGVIAPSYKAFTKEVKRRTGYEQTKKRQGHRAAYQYESFYWELTTTTPRHGDRPFEIGHIDHTELDVELVCSDTGRNLGRPWATFLVDAYSRRLLAVYVTFDSPSYRSCLMVLRICVKRHGRLPQIVVVDNGAEFHSVYFETLLATFECTKKQRPPAKARFGSVCERLFGTSNTQFVHNLLGNTQITRNVRQVTKSVNPKNLAVWTLGLLYEYLCAWAYEVYDTDEHPALFQSPRDAFAAGIAIGGSRVHRMIPYDENFQILTLPTTSEGKAKVQVGRGVKINSIYYWSNSFRDPQIENTSVQIRYDPFNIGIAYAFVRGQWVQCISQYYAELQGRSEKELKLASIELRKRSSNHAQQSKVSAKNLAEFLASVEAQEALLEQRSYDTEAREVFRVIEGGKAATSRNEQPKLIQVPFGNTDSQVDEDEALIPEILVVYEDF

SEQ ID NO: 495 - protein, 383 aa, Nostoc sp.
MTTLDAFPLELLTQPATERLAYFENKTVAHPRLQEVNEILMRTIAEPAGASFIFVYGPSGIGKTTLRLRAEEKLTELALPKLESDRAHVPVIGIEAIAPESRYFNWKEYYTRALIALEEPLIDHKFDYGVRGISRNNFGKINVESKVVAPALRRALENALIHRHPDVFFVDEAQHFGKVASGYKLQDQLDCLKSLANMTGILHCLLGTYELLTFRNLSGQLSRRSVDIHFRRYCADSPEDVQAFKSVLLTFQQHMPLAETPNLVDHWEYFYERTLGCVGIVKDWLMRALKDALDREATTITLKDLQKRALSVAQCQKIFKDIQEGELQLSETEAHVQDLRSALGLGAKPIVLPEETPKTTRPPKKVAKRKPKRDPIGVQQDVS

SEQ ID NO: 496 - protein, 462 aa, Nostoc sp.
MLASVLETYESWNLKKPLIPQRSRLYQPQPVGLGTPYIESLTGYIARIAELHGVLPGVLMTREIAPMVNKLYFQNGANRGFREIFNRSQALNGMGEMAADLVQVLQKLTLRDDLRFLTMLFWSNILTPRNLFRTRKAWCPICYQERHQNGLVVYEQLLWTINLITICPQHQKPLLDFCPHCNHESPLLNWRSRPGYCSKCGEWLGANQCLKTFTDGEGSIKLQLEWQYWTANVVGELILAAQCFESAPSKENITKSLNIVIDKVAENNAAAFSRLIGVPKNSLWMWQSTKTLPELNTLLKICYELEISLVEFLTPKNIITKSFTKVSQKHLQLSRTPRVSPKSFDQYQVKDALLAILAGNEEPPPTMEEVGKRLGHHNRTISRHFPDLCSAISAKCRNYNKACRLKSIEKLCSEVREIVLSLNAQGVYPTEGRVCELMPNPGCFRYKQVRAAFNDARREFGL

SEQ ID NO: 497 - protein, 329 aa, Nostoc sp.
MTIYSEHWSLKPLEIPQRSRLFSLEPMAVGTPYAESLSSYLHRLAQAHCLTSQKIVMGEIAPLILKDEDKSELLSKNLSHLLGNSDAKPAINGMREMTEKLVTVLEELTMRQDLRFLTLLSWKGMIYDKGLFRNYRAWCPCCWEEWRQENKTIYEPLSWSFKDVELCLIHKQRLIEECSHCGSRLPVMARFSPAGFCSRCYGWLGQEIKGEEDIEKYRVNIQGISELIALTPQLGYKTIPIELTRKLQLILLVFEQAIGKDLKLLGDLGGIMESLRIASRTNQSQPYHLVKLIIPVCEKAKISVFQLFGLDFKELGKILFGNFSLELKL

SEQ ID NO: 498 - protein, 201 aa, Nostoc sp.
MKPHRYKRGHLTYGALSRICPPLHELNNIGIHPIAGIPTRNNLLELTAQSRLKIRIYHQQIPLIYPYLAGQAFHIGQNFYQLDIPDYQPLISSESVYSRLVVIKGFQDSTSFIEAVQRQLDNLGIQGKIELLTRQDGTPQRRQLTINKEGKQFKVRGFGVKISELNPEDSLTLQEQGIGGKRKMMCGIFVPATRSKEEEEI

SEQ ID NO: 499 - protein, 561 aa, Nostoc sp.
MVTTQPNISLSLHAADTTIMHRVGMTGLYMTLKRLEKQYRLSHERGGHISWILTADTIELFWQGSDFIALSWLINESFQLDDTGLIHLVGLDNDAIDLSQKVHIHEGICAVFLRHNQFYQAGELVNTELKVEENKVEYQYKSLTWYAHQTFAEKLCQADTQQLRHDYIQITSWLYLGGIVRHARTQNTTKLEEKSEYALALLFVPVVCHYCLLHIPSEDLKQRKPHRYLVVIPEIKDFEDASQRRWQLQQLETKQLHVSTLGEAGLLYYSLDDIQPESDYYQACQVWLYEKINRASLQRTLMSIEEIEIDKNTLITYQQVQKHFQPNYQKVSGGSGKQVVTFGVALLIQIGLHRLGTLLLWHYHQKIKPKQIFIKVNPIRSLIADNLVKGIHWWSNFWEKLVIEDSKEYLFNQLFSNREGFIIMAENSEEDKQYLIFIKVFQQAMKGNFAKMYAKAEEGKDPPIKKKVERLRAELNYCYDELSFKEYLSDFLVRGGLNKYFNEHQEEIVLLIKKSPWQELRIWSLLAIASYKPKNKPTNSDDNSFPNNQNLEEVNDESEKE

SEQ ID NO: 500 - protein, 323 aa, Nostoc sp.
MMSQKKNDNNIPNYYLYGTVLTRYGLASLNHDIRRGNKTILQKGYWNNGKIYSFVGSSAIRWALRFYLQKQGYLVNRVWDEDEHINRLTSEDFDPEKFYDDDIFGFALLESAETEEDTSTTKRKNKQTKTRTPNQRMGALGMNMAVSLTPYDGAVKLGAKSGREKDSTSLHFTEYHATRYQYYFGIDATHLRDFSRILPLIDGIMNLPKVGGSSNIFNYPFCPDSLVFQWTNHFASYISYCFEYCDPKSKEAKLSQEFIDEVECGQIDPSKLWIGGTIVKELQQLDNFESSPLKKAHIYRNRNEMIEALKTVIKRDLGLEESK

SEQ ID NO: 501 - protein, 212 aa, Nostoc sp.
MIAPLILYLDVPFTTFRESYAREMGKTYPVPPPATVYGMLLSLVGETNVYRHCGVELAIAMLSSPKKSQILRQMRRFKNPDFSHPENLIPCYQEILSNLKCLIWVRSDEEKIQPSLRERIQLAFDHPELVRRFGCLFLGESDQLIKTIKLVSEDYLEGARQWAIRDNRGRLTLPYWVDHVGSRNTRFLRYRIEEMPSSPPPDLAWTMIQSPI

SEQ ID NO: 502 - DNA, 125 bp, Nostoc sp.
  source 1..125: mol_type = other DNA
ccattcagtaaataaaggctagagacagcttagatgtggctttacccataactttgccgcaacggcaagcttatgcttccaataaagggtggcaaggttatggttccagttatataagctgttct

SEQ ID NO: 503 - DNA, 271 bp, Nostoc sp.
  source 1..271: mol_type = other DNA
ggtagtgcaataatctggtattgtcttaacatatccttgtggaaaaggataaaattatttacatctttgcatctcaatatttcggagaattttcgcttttacctctgtgccctctgcgtctctgcggttcgttaaagaagaataaaaccacagaggcgcagagaagccagtgcgttgcgggggttcccccctttgtagcaactggcgcgacacagagaaataagagggcaaaggtgtaagtaatattaagcgaactgcaaaaatcgagact

SEQ ID NO: 504 - DNA, 109 bp, Nostoc sp.
  source 1..109: mol_type = other DNA
tttgagcaacgcctaacggcataaagccacgaatcacttcaccactcaaccgaaatgaaacagaccgagtattttgagcaacgcctaacggcataaagccacgaatcac

SEQ ID NO: 505 - protein, 898 aa, Nostoc sp.
MKEQFEQWVARLQISEAGQKIIEKVRSSEPSRRVGGGSKNVSGRYPSRKMGVTIQFESHRVELPIIYQLEHDKDVLEFYDQPPQIKLDYQASNGRRLGVLHTPDLFVIRTNSAGWEECKTEQDLKKLAEKNPNRYFYSEENNQWHSLPGEVYANQFGLYHRIHSDREINWVLQRNLQFLEDYYRSESLVVEEAIAQSLLAIVSSQPGITLAELLNRSTGAKSDDIYTLIIQEQIYIDLNATPLAEPERCLIFRDEQTASAYRLMVEQPSVSLPAISPVVNIVTGATVSWDGKGLNIIHVGETEVILGAENNQLIELKKAIFENLVRQGKITSLQTPEKTAISTESWQRFHQASPEDQAEALERYKTIEPYLNGHPPENETIPARTIRHWKAKYLIAIQKYGCGYIGLLSHRSVKGNRQRKLPEDTLAIMEKFILEDYETLKQKRMWEVHAALVRACEEAGVIAPSYKAFTKEVQRRTGYEQTKKRQGRRAAYQHESFYWELAITTPRHGDRPFEIGHIDHTELDVELVCSDTGRNLGRPWATFLVDAYSRRLLAVYLTFDSPSYRSCLMVLRICVKRHGRLPQIVVVDNGAEFHSVYFETLLATFECTKKQRPPAKARFGSVCERLFGTSNTQFVHNLLGNTQITRNVRQVTKSVNPKNLAVWTLGLLYEYLCAWAYEVYDTDEHPALFQSPRDAFAAGMAIGGSRVHRMIPYDENFQILTLPTTSEGKAKVQVGRGIKINYIYYWSNSFRDPQIENTSVQIRYDPFNIGIAYAFVRGQWVQCISQYYAELQGRSEKELKLASIELRKHYSNHTQQSKVSAKNLAEFLASVEAQEALLEQRSYDAEVKEVFRVIEGGKATTSRNEEPKLIQVTFANTDFQADEDEAIVPETLVVYEEF

SEQ ID NO: 506 - protein, 383 aa, Nostoc sp.
MTKSTGFPLELLTRPATERLAYFENYTVAHPRLKEVYEILMRTIAEPAGASFIFVYGASGVGKTTLRLRVEQKLTELALPKLESDRARVPVVGIEAIAPESRYFNWKEYYTRALITLEEPLIDHKFDYGVRGISRDNFGKINVESKVVAPALRRALENALIHRHPDVFFVDEAQHFGKVASGYKLQDQLDCLKSLANMTGILHCLLGTYELLTFRNLSGQLSRRSVDIHFRRYCADSPEDVQAFKSVLLTFQQHLPLAETPNLVDHWEYFYERTLGCIGTLKDWLKRVLSDALDREATTITLKDLQKRALSVAQCQKMFKEIQEGERQLSETEADVQNLRSALGLGAKPIVLPEETPKTTRPPGKVGKRKPKRDPIGVQQDVS

SEQ ID NO: 507 - protein, 462 aa, Nostoc sp.
MLASVLETYESWNLKKPLIPQRSRLYQPQPVGIGTPYIESLTGYITRIAELHGVLPGVLMTREIAPLVNKIYFQNGANRGFREIFNRSQALNGMGEMAADLVQVLQKLTLRDDLRFLTMLFWSNILTPRNLFRTRKAWCPICYQERHQNGLVVYEQLLWTINLITICPQHQKPLVELCPHCNHESPLLNWRSRPGYCSKCGEWLGANQCLKTFTDGEGSIKLQLEWQYWTANVVGELILASQCFESAPSKENITKSLNIVIDKVAENNAAAFSRLIGVPKNSLWMWQSTKTLPELNTLLKICYELEISLVEFLTPKNLITKSFTKISQKHLQLSRTPRVSPKSFDQYQVKDALLAILAGNEEPPPTMEEVGKRLGHHNRTISRHFPDLCSAISAKCRNYNKACRLKSIEKLCSEVREIVLSLNAQGVYPTEGRVCELMPNPGCFRYKQVRAAFNDARREFGL

SEQ ID NO: 508 - protein, 329 aa, Nostoc sp.
MTIYSEHWSLNPLEIPQRSRLFSLEPVAVGTPYAESLSSYLHRLAQAHCLTSEKLVMGEIAPLILKDEDKSELLSKNLSHLLGNSDAKPAINGMREMTEKLVTVLEELTMRQDLRFLTLLSWKGMIYDKGLFRNYRAWCPCCCEEWMQKNKTIYEPLSWSFKDVEFCLIHKQRLIEECSHCGARLPVMARLSPAGFCSRCYGWLGQEIKGEEEIEKYRVNIQGISELIALTPQLGYKPIPIELTRKLQLILLVFEQAIGKDVKLLGDLGGIMESLRIASTTNQSQPYHLVKLIIPVCEKAKISVFQLFGSDFKELGKILFGNFSLELKL

SEQ ID NO: 509 - protein, 220 aa, Nostoc sp.
MTAILIQSEEYVDLTFKLRGAPIPLDNGYLTYAALSRICPPLHELKSIGIHPIAGIPTRNNLLELTAQSRLKIRIYHQQIPLIYPYLAGQAFHIGQNFYQLDIPDYKPLISSESVYSRLVIIKGFQDSTNFIEAVQRQMDNLGIQGKIELLTRQDGTPQRRQLTINKEGKQFKVRGFGVKISELNPEDSLTLQEQGIGGKRKMMCGIFVPATRSKEEEET

SEQ ID NO: 510 - protein, 526 aa, Nostoc sp.
MIVSTQPKISLSLHAADTTIMHRVGMTGLYMTLKRLEKQYPLSRQRGGHISWFLTADTIELFWEGSDFIALSWLINESFQLDDTGLIHLVGLDNDRIDLRQKIHIHEGICGVFLRLNKFYQAGEIINTELRFEEKQVEYQYKSLTWYAHQTFAEKLCEADTQQLRHDYIQITSWLYLGGIVRHARTQNTTKLEEKPEYALALLFVPVVCHYCLLHIPSEDLKERKPHRYLVVIPEIKDFEDASQRRWRLQQLETKQFHVSSLGEAGLLYYSLDDIQPEVAYYQACQVWLYEKTNKASRQRTLMSIEEIKIDKNILITYQQVQKYFKTNYQIIKYKQIFIKVNPIRSLIADNLVKGIHWWSNFWEKLVIEDSKEYLFNQLFSNREGFIIMAENSEEDKQYLIFIKVFQQAMKGNFAKIYAKTEEGKDPPIKKKVERLRAELNYCYDELSFKEYLSDFLVRGGLNKYFNEHQEEIALLIKKSPWQEIRIWSLLAIASYKPKDKLTNRDDSSLSNNQKLEEVNDDSEEE

SEQ ID NO: 511 - protein, 323 aa, Nostoc sp.
MMTQKKNDSNIPNYYLYGTVLTRYGLASLNHDIRRGNKTILQKGYWNNGKIHSFVGSSAIRWALRFYLQKQGYLVNRVWDEEEHINRLTSEDFDPEKFYDDDIFGFALLESAETEEDTSTTKRKKKQTKTSTPNQRMGALGMNMAVSLTPYDGAVKLGAKSGREKDSTSLHFTEYHATRYQYYFGIDATHLKDFSRILPMIDGIMNLPKVGGSSNIFNYPFCPDSLVFQWTNHFASYISYCFEYCDPKSKEAKLSQEFIDEVECGQIDPSKLWIGGTIVKDLQQLDNFESSPLNKAHIYRNRNEMIEALKTVIKRDLGLEESK

SEQ ID NO: 512 - protein, 212 aa, Nostoc sp.
MIAPLILYLDVPFTTFRESHAREMGKTYPVPPPATVYGMLLSLVGETNVYRHCGVELAIAMLSSPKKSRILRQMRRFKNADFSHPENVIPCYQEILSNLKCLIWVRSDEEKIQPSLRERIQLAFDHPELVRRFGCLFLGESDQLIKTIKLAREDYLEGVRQWAIRDNRGRLTLPYWVDHVGSRNTRFLRYRIEEMDRLSPPDLAWTMVQSPI

SEQ ID NO: 513 - DNA, 131 bp, Nostoc sp.
  source 1..131: mol_type = other DNA
taaataaaggctagagacagcttagatgtgactttacccataactttgccgcaacggcaagcttatgcttccaataaagggtggcaaggttatggttccagttatataagctgttctagttttacatataa

SEQ ID NO: 514 - DNA, 389 bp, Nostoc sp.
  source 1..389: mol_type = other DNA
gtggttaggaggatcttctaatactccagtagttactcagaacagatggatagcccaaagtctctatcccataccagcataaaccgcttctgctccattctaaaaaaattcggcgttttcctgctttctatgcttgattggactcacggcaagcttatccttccaatttggactagcggcaaagttatggttccaaactgtcaatttcatccaaaattagctgacgcaagaatgagggttgtagtgttgttgacggcaaagttatggttccagtaacggcaaagttatgggtaaagtcacaaaactagttgacgcacttttaccgcttcagcaaccaggggaattatagtaccagccattgagtgaccgactaacacaatatcatcatc

SEQ ID NO: 515 - DNA, 466 bp, Nostoc sp.
  source 1..466: mol_type = other DNA
ttgagcaacgcctaacggcataaagccacgactcacgttttgaaactgcctattgctcctagagcagaattttgagcaacgcctaacggcataaagccacgactcactgtccacaaaatgatatcccggtctgttttagggaattgagcaacgcctaacggcataaagccacgactcaccacatttcctgagttgctgcctgaagcaaaaaagtacccttgagcaacgcctaacggcataaagccacgactcactgctttatcccttggctatcgtgccgagtaaaagattgagcaacgcctaacggcataatgccacgactcactcgttgaaaaagatgaatcgcttgctagcgatcgcttgagcaacgcctaacggcataaagccacgactcaccgcaaccaaagaaacagcccgactcagagaagagttgagcaacgcctaacggcataaagccacgactcac

SEQ ID NO: 516 - protein, 235 aa, unidentified
  REGION 1..235: note = Synthetic
MKEQFEQWVARLQISEAGQKIIEKVRSSEPSRRVGGGSKNVSGRYPSRKMEVTIQFESHRVELPIIYQLEHNQDVLEFYDQPPQIKLDYQATNGRRLGVLHNWKAKYLTAQQKYGCGYIGLLSHRSVKGNRQRKLPEDTLAIMEKFILEDYETIKQKRMREVYGALVLVCEQSGVIAPSYKAFTKEIKHRPVYEQTKKRKGRRAAYKHESFYWELTKTTPRHGVREAHAAGLSPL

SEQ ID NO: 517 - protein, 399 aa, unidentified
  REGION 1..399: note = Synthetic
MAFAKRMPQAYRPFEIGHIDHTQLDVELVCSRTGSNLGRPWATFLVDAYSRRLLAVYLTFDSPSYRSCLMALRICVQRHARLPQIVVVDNGAEFNSTYFETLLATFECTKKQRPPAKARFGSVCERLFGTSNTQFVHNLVGNTQITRNVRQVTKSVNPKNQAVWTLGSLYEYLCTWAYEVYDTDEHPALFQSPRDGFAAGMAISGNRVHRMIPYDENFQILTLPTTKSGKAKVQIGRGVKINSIYYWSNSFRDPQIENTSVQIRYDPFNIGIAYAFVRGQWVECISQYYAEFQGRSEKELKLASAELRKRSSNHARQSQSYAKKLAEFLASVEEQEGLLEQRSYDAEAREVFRIIDGGKATTSRNEQTKIIPANFENTDTPADQDEALIPDTLVVYEEF

SEQ ID NO: 518 - protein, 384 aa, unidentified
  REGION 1..384: note = Synthetic
MTKSTGFPPELLKQSATERLAYFENYTVAHPRLKEVYDKLMGTIAEPAGASFIFVYGASGVGKTTLRLRVEQKLTELALSLLESDRGCVPVVGVEAVAPESRNFNWKDYYTRALIALEEPLIDYKFDYGVRGISRDNNFGKINVESKVVAPALRRALENALKHRHPDVFFVDEAQHFSKMASGHKLQDQLDCLKSLANMTGILHCLLGTYELLTFRNLSGQLSRRSVDIHFRRYCADNPEDVQAFKSVLLTFQQHMPLAETPDLVSHWEYLYERSLGCVGILKNWLTRAFKDALNREATTVTLKDLQQRAWSVAQCKRMFQEIQEGERQLSETETDVQNLRSALGLDTKPITLSEETPKTTRPSRKVGKRKPKRDPIGVQEDVS

SEQ ID NO: 519 - protein, 335 aa, unidentified
  REGION 1..335: note = Synthetic
MVNPKRMTIHLENWNLKPPKIPQRSRLFSLEPVAVGTPYAESLSSYLHRLAQEHCLTSQKLVMGEIAPLILKNEDKSELLKKNVSHLLGNSDAKPAINGMREMTGQLVTVLEELTMRQDLRFLTLLSWKGMIYDKGLFRKYRAWCPCCWEEWRQKNTTIYEPLLWSFKDVEFCLIHKQRLIEECPHCGSHLPAIAKLSPAGFCSRCYGWLGQEIKGEEEIEEYRVKIQGISELIALTPQLGYEPIPIELTRKLQLILLVFEQAIGKDLLLLGDLGRIIESLKIASKTNQNQPYHLLKLIIPVCEKARISVYQLFRSDFRELGKILFENFGLELKL

SEQ ID NO: 520 - protein, 128 aa, unidentified
  REGION 1..128: note = Synthetic
MEKELATLVNKKYGSTNLHKIYKHTTALNGSGVMALDLVQALQKLTLRENLCFLTLQTWCKLFPSRNLLRPVRAWCPICYQEWYEKKQLIYEPLLWSLDVVEICPYHNYKLIVECSHCHQKNTTLAWR

SEQ ID NO: 521 - protein, 268 aa, unidentified
  REGION 1..268: note = Synthetic
VKLASWNHNFADSSFWNDKPAVSSIEYRKQERAEGVYAGVGDKFSSMTALLIPSEEYVDLTFKLRGAPIPLDNGYVIYSALSRICPSLHELKSVGIHPIAGIPTRNNLLEIAAQSRLKIRIFHQHIPLLYPYLAGQGFHIGKNSYQLDIPDYKPLISSESVYSRLVVIKGFQEPSNFIEAVQRQLDNLEIQGKIELLTRKDGTPQRRQLSISKGGKQFKVRGFGVKVSELNPEDSLTLQEQGIGGKRKMMCGIFVPATRNKEEKETIT

SEQ ID NO: 522 - protein, 318 aa, unidentified
  REGION 1..318: note = Synthetic
MIATQPKISLSLDAADTTIMHRAGMTGLYMTLKRLEQQYPSSLQRVAYVSWLLTTDTIKLFWEGSDLVALSWLIKESFKLDDTGLIHLAGLENDEIDLSHKIHIHEGISAVFLRHNRFYKAGKLVDTELTLEEQKVEYQYKSLTWYAHQTFAEKLCDTDTQKLRCDYVKITSWLYLGGIVRHAKTQNITKLEETPAYAFALLFVPVVCHYFLFHIPSEDLKEKKPHRYLMLIPEIKDFEDASQRRWRLQQLETKQFHVSNLGEAGLIYHSLDDIHTEVDYYQACQVWLYEKMNQASRQRTLMGIEEIKIDKNTLTGHC

SEQ ID NO: 523 - protein, 319 aa, unidentified
  REGION 1..319: note = Synthetic
MMSQKKNDNNIPNYYLYGTVLTRYGLASLNHDISRGNKTTLQKGYWNGKVHSFVGSSAIRWALRFYLQKQGYLVNRVWDEDEHINRLTSEDFDPEKFYDDDIFGFALLESAETEEETSTTKRKKKKTKVSSQNQRLGALGMNMAVSLTPYDGAIKLGAKSGREKDSKSLHFTEYHATRYQYYFAINATHLKGFSRILPLIDGIMNLPKVGGSSNIFNYPFCPDSLVLQWTNHFASYISYCFEYCDPKSKEAKLTKEFIDEVECGQIDPSTLWIGGTIVKDLQQLDNFDNSPFKKAHIYRNRNEMIEALKTVIKRDLGLK

SEQ ID NO: 524 - protein, 212 aa, unidentified
  REGION 1..212: note = Synthetic
MIAPLILYLDVPFATFRKSHAREMGKTYPVPPPATVYGMLLSLVGETDVYRHCGVELAIAMLSSPKKSRILRQMRRFKNADFSHPENVIPGYQEILSNLKCLIWVRSDGEKIQPSLRERIQFAFSHPELVRRFGCLFLGESDQLIKSIKLVSEDYLGEARHWVIMDNQGWLTLPYWVDHVGSRNTRFLRYRIDEMDKLSPPEKAWTMIQSPI

SEQ ID NO: 525 - DNA, 287 bp, unidentified
  misc_feature 1..287: note = Synthetic
  source 1..287: mol_type = other DNA
ttttaatagcttatgcttccaataaaatgttgtgactttacccataactttgccgcaacggcaagcttatgcttccaataaaatgtggcaaacttatggttccattttttcgtgataatttttaacatatattccgtatttcatattgtattacgaagtaacacaataattatggttagcttggtgattttttacttataaatacttgactttttccaattttgtgcattaagtgcgtattacataatgaagtgcggaatgtcggttttaagcttcacaacccaagt

SEQ ID NO: 526 - DNA, 249 bp, unidentified
  misc_feature 1..249: note = Synthetic
  source 1..249: mol_type = other DNA
ggttatggtgttgttggcggcaaagttatggttctagtcgcggcaaagttatgggtaaagtcacaaatgtggcaaacttatggttccaattttttttgataatttttaacctatattctgtaccctcactgtcgtaatcacggatttatatggattaaaggattacacggatgattaataggagagtttttatgggttcgtgtaatttattgaattagtattttacatgacgaggcgtttgaaagttag

SEQ ID NO: 527 - DNA, 304 bp, unidentified
  misc_feature 1..304: note = Synthetic
  source 1..304: mol_type = other DNA
ttgagcaacgcctaacggcatgaagccaagactcacaactttacattaattttagggcaagctggaattaagttgagcaacgcctaacggcataaagccaagactcacaatatatgaccgcattggggacaaaatccagtaaattgagcaacgcctaacggcataaagccaagactcacctaccgattatccaggagaagcttgtctgtatttttgagtaacgcctaacggcataaaaccaagattcacccatcatagcatttggcttattcatacctgatgcttgagcaacgcctaacggcat

SEQ ID NO: 528 - protein, 735 aa, Cyanothece sp.
MVKANPGIYLSELQQKIEIASIDDFHVLILTDKIYVDLFAIPLSCPEQVQVFLSATEAFTHSQLTTIVPSNWETFNSPLNVAIGTQISWDGQPWTIVNLGNNYVGLQGENNTFQHLPNSVFSTLVHQEKIVGLSSPNFSSLNPKIEEIFSYTSQADLQEAHRRYQQIEAFLKGTASTPTNRTQRRWLASYRKAEQLYGRGFIGLIPQHRHKGNSLSKMDKDVHQLMEKHIQEEYETHKQPSIRHAFQAFKELCAHTGLRPPSLETYRRSIRNRPVVEQVKKRQGSRAAYQEETFYEFLDRNTPIHGERPFEIAHIDHTLADVQLLSLIMLNLGMEMNEGEHQANLGKAWVTLLIDAYSRRILAAYMTFDSPSYRSNMMVLRICVQRFGRLPQILVVDGGRDFQSGNFEMLLAYSHVTKKERANTRDGSVIESFFGVADREFWHNLKGNTQIMKKVRQVTKSVNPKYHAVWTLDKLYRYFCEYCYEIYDTCPHPTLRMTPREAFEIGLARGGLRGHLLIPYEEFKLLSLPAPTDNDGMRRITPKGIKINYLYYGHPSFERVRNTRVAVKYEPFDVTIAYAYIKGEWVQCRSGYIRELQGRSVKELITASDELKKLNQLQNQQFSDITGKNLAQFFTRIEREEAILTPSWREAKKAVQAQHLRDEELKEVLNEIEGKPSTKETSNDSSEIDLFTFENREYIALSSSISPPSPIQQTQVDEDDDNDEFEELFEPLEEW

SEQ ID NO: 529 - protein, 399 aa, Cyanothece sp.
MALQGFPPELLNQSPQKRLDFFKSPDITFMHKILHKTYNQLYRKVCKPAGASTILLIGPSGVGKSTLMDLLKKRILEESLPQMELEPAWIPIICVEADAPGKGTFRWKKFYQQVLLEVDEPGIKYKIDYNKINYEEEGIRRGNNGRLIIGARATEDSLKISMKQALKYRHPYTLAIDEFQHIGIRANEDLLKAHMDCLKSVVNGTKIPLTGFGTYELLEFLELSPQLSRRTLKIHFHRYRWENDDECKEFKRVLYNLIHRMPFPNQPTITKQIWEFCFERSIGNIGTLIDWLTDAYDLALANDAPSLSFDYLKETAKSRLDCEQMIEEAIEGEARLEETEDSTNRLKVLLGMKSASKPSKSNANSTDPNSTAQKTKKDVKNKPFKRKPVRDQVGGQDET

SEQ ID NO: 530 - protein, 147 aa, Cyanothece sp.
MKPDSYEPLEWYDLKLLILPKFLYLIFLTINFSSSVFASPENLAKAQPHQQKRISPRSCDLNQIENFLNQHLEQSPDLISPLTIIAKNLKVDKKFISRYFRDLCQKIVAKRLSYKKDCYLDSLKQCCNEVEQVTKMLFKQGEYPTED

SEQ ID NO: 531 - protein, 343 aa, Cyanothece sp.
MSNYNELDDGLEIVSLKSPETPKRSRLFSLEPVGIGTSQTESLSSYVNRLAEAHCVKSQKLIMLEIAPQILGKDYQSPLHSKDVSSLFGNTDAKPALNGMRDMKLLLVQALEKLTQRQDLKYLTCLSWKEVINKRGLFRQYRAWCPQCYEQCKQDKVSLYDPLLWSFKDVKFCLHHQCQLVDECPKCGSHLPVIANFLPLGHCFYCGEWLGDNKNKNPKCNFKNFPESLLIIKNIGDLIAVTPRLGSQPTLDEFIQKLQLILFCFEKVISQDLKHIKVLGKIIEHLKLNLSQHGDKPLNLIKIIIPVCSKAHISVSELFLEDLTGLSKILFDNFQINYQLPIL

SEQ ID NO: 532 - protein, 194 aa, Cyanothece sp.
MEAISIHPIAGIPQPLNQLRLTNRSRLRIRLPIDQIPLVYPLAGQTITIDWGIERVSHQAKFQLGIPYPTALQPASTLYSRLVLIHRAETPEAVLEVAQRQLNRKGIKGTIELPTRANGEVQCRLLTIKKKHQLFRLRGFGMKVTKLSEKDSIKLQQSGIGGKHKMMCGVFVPTWRETTEKDENSNVLVIYSGR

SEQ ID NO: 533 - protein, 418 aa, Cyanothece sp.
MTGLNPPSIELINQIHLHFSIGATFLRHCKFCKYGKQTVQEIIIEGKQRKLTYKPIKWYAHQTFAKQLCQAGQLLTDYISIISWLYLGATVRHAMLDKYNKIQEKPEFALVLLFVPVVCQYFIFHPYYEKTDNNNPEKYLIVIPEILDLEEAAYQRWQSGNLAYKNYHVSSLGEAALITYSWHEVETQRSCERTCQVLLYEKFNKDSHQRSLIETRDITINLNILNTYFLIKQFFQENQFDSYGKNRWIKVNFIRGIIADNLVKGVPWWSDFWKILNQEDIDGELAQQLIDNKEGLIAMIEQDKEMEDYKLFVQAFHEALRRNYAKIQKRTQEGERARFDREYERIRGELNRCYDEHSFSDFLADFLARAGFLSTLYDEWDSVLPFITESVPWQKARNIALFALATYKPVSKNQLEGE

SEQ ID NO: 534 - protein, 301 aa, Cyanothece sp.
MFYLFGTVITHYGPASLNHEKARGNVSPLQKTYWDGHIHSLVSGDAIRWGLRYTLQKEGYPINRRWNEDEFTNDLVNENFDPVEFVDDDLFGYMYAEAAKEDIQEEEPSSTGKERRNQTKGSIVQRLGALGVNRGVSLIPYTGALTFNAKSGKIKDRTALHFLEYHNTRYQYTFALDPNHLKVKERILAFIDALMNIRKVGGNNNVFCYKFTPESFVLCWTQRETPGIFYCFEEGDLIPKMKSEVLEDIEVGDIKASELWIGGRVAKGLKIKNAHIFRGKEQAIEDLKKVIVKDLELSYPY

SEQ ID NO: 535 - protein, 211 aa, Cyanothece sp.
MSSIAVYIDVPFASFRQSHSREYGKTYPVPPPATVYGMLLSLVGEWDVYLHCGVQLAMAMISQPQISKVLRRIRRFKVKNFSDDRNTNPEYQEVLSNIKFIVWVASKNEQAQPTLRERIEQALIYPESVKRVGCLYLGESNDLVNKIKLISNDYCFEERWWLMQDEDGLIILPYWVDHVGSKNTRWLRYGLKKISVEFPPESCWTTIQAIR

SEQ ID NO: 536 - DNA, 580 bp, Cyanothece sp.
  source 1..580: mol_type = other DNA
cgtcccttttctttgctctctaattctttcattgggacaacaaccataaagtgaccaaactgacaactataagttgaccagagcaattgtcacttaaaggataaagtggccgcttttaaagcataaagtgaccgtccctggaatttagagtaaaagattgcctataagcataattaactggctttagtttttaagaaagagacgatcaccttttgttacggaataagttctagcgcccttgtagtttaggttttagacagcggccactttatcctttaaaaacggccactttttactttaagtaacagcaatccctgaaatgcttagtttttcgttggcgaattcaattgaaaatgtacgcttgacaatcataagttgtccgaaagtccaaaaaacaaccataaggtgtccttgagttccagcgacacaatgtttacactctctacaagacagcaacaagacagcaaccgaagcaagtaattaagaattttttattatttttattaatatttgagcttaagaagatagattaaaattatgtttgccaagcacaattgttaaaaaagggcatttaacgata

SEQ ID NO: 537 - DNA, 270 bp, Cyanothece sp.
  source 1..270: mol_type = other DNA
gttaggattaaaattaaataactaatttattcttaactcaagtgacatcaataacaacgataagttgtccaccttctttgacaacgataaagtgaccaatttggtcaacttatggttgttgtcccattcatctaaatcggtcgtccaaccgacataatgctgcgcggtatgcttgggagaaatgggacgggcaaaatgcaaaatataaacgtatcccatgatttttactttttaaaaacttcattaagcagcaatgcggagcatgaaatt

SEQ ID NO: 538 - DNA, 274 bp, Cyanothece sp.
  source 1..274: mol_type = other DNA
tagataacgccattaggcagttagccatgatgcacaatggaacgggcaaaatgtaaaatgtaaacgaatccctgagcaacgccaataggcagtaaaccatgatgtactatgctttattttgctattgatagccaaggaactgttcagtattgagcaacgccaataggcagtaaaccatgatgtacgacgcggtttcagcaactgaggcgggttcagcaacgaatcaagcccgattttcttgagcaacgccaataggcagtcagccatgacgcac

SEQ ID NO: 539 - protein, 396 aa, Stanieria sp.
MSSEREFPLELLKANKEHRLNYYDEYTMAHPFLDRAFEDLKPLVRHCGETRLIFIVGPTGVGKTKLRQLTEKWILEKLWESIRSNMGHLAVASVEAVLQKSGLFNAKDHLKRCLYALHEPEEFIKNKINYGVDGIYRTDEGKLAIKSRILETDLGWALEQALKHRHPQIFFIDEAHHMLAVASGRKLTEVPEAIKSLANRTEVLHGLIGTYDLLTLHDIGDQLSRRSLYIHLPRYDAKFIEDREDWQSIVWNFQTQIPIEEEPDFVSDWEYLYERSLGCVGILKNWTRNAFADAMEDEAKTVTLKHLERRALSIGQCRNILKKIKEGENNYAAIEGEVEKLRTELELGIEPISRTQPISQSYSGANQTASQKPKSKQAVGQRRAKRDRVGIDKDAG

SEQ ID NO: 540 - protein, 455 aa, Stanieria sp.
MQDKIFKKYRSLKLQCTPERSSKLYSITPIGIGNSLIESLTSYISRLALAHCVYPGILMERVVSSVIDKKYSSADIHKLYSFTDAINGTGVMGLDIVNALEKLTFQNRLSLLTLTNLSELIPSRKLLHDYKLWCPQCYRNCHTRSEEIYEPLIWKLKTVAVCSIHNLPLQEFCPYCLKKNYHLAWKTRPGYCSQCGQWLGELKAYDQSLLAKEKDETLNWHLWVSKNLEELLIKNSSRDVTWSKNTISQSLMRYAQQNAEGNIAALARQLEMPKNTVWLWCKGKNQPTLEMLLRICYGLKVSVWNFLTQENLIESEKVHLIASPPELKSKAKSKVLELDKIKEYLEQVIKKETIPPPSMEQVARDLQFQRRTISRHFPELCRVISANYTKHRKATHRQAIESSCQEVREAVKQLHSEGKYPSHNKVEKLISRPGLLRYEEVKKAFTKAKQELNFK

SEQ ID NO: 541 - protein, 340 aa, Stanieria sp.
MAEEGKLNRYKHLIFSNPIDFPETSCLYSLESIAVGTPYTESLSSYLNRLAQEHCVTPQKLIMGEIAPTILGDKYAPEIFSKNVSSLFGNSDAKPAINGMREMTRSLVDALEKLTLRQDLRFLSCVTWKGIISDRGLFRQYKAWCPLCFETWRQARKLIYEPLLWSFREVDFCPEHQCELCDRCPHCDSFQKAISDFSVPGYCSRCRHWLGKSDNTKSSLQEDFKQNHFILQGIGDLIALTPQLKHQPNLKSLKHKFKLILFCFERAIHHDLGQYVVLIKLIEKLKIDLKQNYFKPINLTEIIIPVCQQAKISVSQLFENNYENLAQILAQNIETDYKIL

SEQ ID NO: 542 - protein, 216 aa, Stanieria sp.
MAIAQVGREEQHEEIELIQNPYIELAFPVMGTSLPIDHGYQLYSALKYRLMQLKDWDDISIKTISGKCDRHKRNEINLTNRSKLLVRLPSEKVPFVYSFSGKSLTIGNHKIRLGIPNMNFLQPKSKMRSHIVVIRGYEEPKTFLEAAKRQLDALNIQADIKLISNQDGTPKRKTIAVKQTLVGFGIEANHLSEADSITLQEKGLGGKHKMGCGVFV

SEQ ID NO: 543 - protein, 565 aa, Stanieria sp.
MIVKADEPKIEISLSDPGMTMLHRAGVAGLYMSLKALAKRYPTLKSRQGNFQWTLTKNSISLNWKGNDYEALDWLFSESFQISSDGLISLTGLQSPNWETQLAIHVGIKNTFLQHNQFFRSAEDAIESLTIDNLEVQIEYKKVKSYAHQYYAEQLCPIERLNFKRIFTKLRLFIFIHYTLIGFLFLYEIRQGGNLEQNVVGITGWLYPGATVKHYAYQKETQFTETLERAIALLYAPVACLYFIAPKSYLYDTKTQYCLVIPEITDLKSYPRQRQKLNNWNYQQFLASGYSDAGFRLLTQQATLRILQQNNLKRCQIITFGQTQWTRFQKIRKNVEVIELTDKIIKNYRLCDRYFKNRVVEWEDGNFIAASIVRELIAENLARGFSWWHNFTHTVRSNKLFRLISYEKKGLQQMVKNTDWDEEAQKLFVQACHKALHQIRGKLASKAKEDEYVQFERENERIRSSLIRCQNSEDLRHFLATFWSKAGIISLLSQHWQQLMPLTTKPSNWKLARDLALLALASYTTPEGYKQTSQEEKPKDVEDRKPDQEETSSSTVKTQELSEEE

SEQ ID NO: 544 - protein, 336 aa, Stanieria sp.
MTFYLYGNILTFYGVAANNRGENQGNISTLQKLLWKGETHTKISAEAIRWAIRYYWQKAGYQVNRVWDDEVNDYTWQDPKFNPLDFIDDDLLGFFEAESAKKEPENAPNKSQSENVNNEPQPENAKLENTNQSKSKKKLPKKLKPKGSVTHRKGRLDVTRAISLLPYDGNVTFNAKSGTKTRTSIYGTEFHATRYQFGLGITPESCQDKSRVLALLDALVSICRVGGNHGRFLFDFAPESIVLRWTSDFTPRFLYCFEEDEMDNICTPELLRQIRSGDLEPTEFWISGKIAENLQGSEYSKVNQFSGIKAMVDALKQKIACDLQFCLLDQTNRGEN

SEQ ID NO: 545 - protein, 209 aa, Stanieria sp.
MMIALRVDVPIASFPTSRSREYRETYPVPPPSTVYGMLLSLVGETDRYKHCGVKIALALLSEPAKSITLRKTRRFKSQKIDHKENTRPDFQEILTGIEFIVWIDTGDDLAQPDLCDRITGAFANPGSVQRFGLLCLGESRDLVNSIDLLATTDFEQPLQYLIQDDYGYLSLPYWVDRVGSSKTRWLNYSLEALEVQQPPHSAWTKIQAP

SEQ ID NO: 546 - DNA, 419 bp, Stanieria sp.
  source 1..419: mol_type = other DNA
aaaaataacgaccgactctaaataaattttgctattaaatgaatagatttattgtcattcctgctttgaggtcgtggctcaagcgttcgtggtcggcaattttgttgggcggacggacattctttttcttatttactcgcaagcttgattgtcactggaagcataacttttcggcaattataaccataatatttccgccatccaatcaaatattgctattttgacgttaattattttgtaaaattttgaccttgtagaagcataacatttctgcaagtcaaaaatagaaacataagctttccgcaggtctatctctcaagatcgagcttctaaattggtttttgttttaggataatatatttttgcagtaacttttttcatctcatcaattcataaacgtagaatcatctcaagagaaa

SEQ ID NO: 547 - DNA, 216 bp, Stanieria sp.
  source 1..216: mol_type = other DNA
cgcaaagcgagccactgcgtcaacgcacgataccagaaacctttttagttattaactataatatttctatctaagtattgattatcgtgcatcggaagtataagatttccgcagtgcattagaagtataagctttccgtggcggaaaagttatgcttccagtgacaacacaacatttaataattgaatttacaacagatggagctaaccggactcg

SEQ ID NO: 548 - DNA, 253 bp, Stanieria sp.
  source 1..253: mol_type = other DNA
gggcaaccagattagatgtcgtcaggcgttgtgaacaagagttttaagtatgaattgaaagtgacaggactcgacgggcaaccagattagatgtcgtcaggcgttgtgaacatcaacgagattatccgcagttattgtatccgcaagggcaacaagattagatgtcgtcaggcgttgtgaacggaaattgccccaggggtggcttatcccaagtttgctgtaaccagattagatgtcgtcaggcattgtgaaa

SEQ ID NO: 549 - protein, 922 aa, Cyanothece sp.
MLSDTEFQTWCDGMQLSQRQRELITQVRTSPPIRKVKGSARNVHGRYPSKKMGTTIQFESHTVELPALCEFYEYDDSVLEYWDQPYKFTIKCAPEGRQATTITHYPDFLVLRKNSCGFEEWKKETKLEKLSEKQPYRYQKQEGIWIDTIVGEYLENLGYYYCVRSDREIDWVKYRNQKYLQSYKHGYLDQQYIIDTAVEEELKDIINHNPGIDLTTLLNKAQNATIDDINTLIALEKVYVDLSVVPIEEQLDKVHLFRDKATAEAYITATHNYSEPITGSVQIVNLKVGSSFLLDGKSLTIDHVGDSKIILKGEQGIIRWTHAEFQQLLELGEITHLETEEKPALDEEGWQYFVEASPKALETANQRYSAIKPLLDGETYSSLDIDISARTLRHWKAKYQKAQQDYGCGFLGLIPQSKGNPTPRYSDEDVEFVDKIIEEQYETFKQKNAWQTYLRLRDRWKESGRTSPIPSHTFYYERIKKRNSYQQTKRRMGSRAANNLLRPWLIELTTPRHGSRPFEICHIDHTPLDVECLCPYSNKNLGRPWVTGMIDAYTRRILALYLTFDEPSYRSCMMVMRICVQRFGRFPELIVVDNGKEFSSTYFETLLARFEATKKHRPKDVPKFSSIIERWFGSQNREFINNLRGNTQIMKHVRLVKKENNPKNLATWTLDELYDYLAFGYAYGVYDRMQHPALEGMSPQQAYELGLAKTGHRPHQYIKYDEQFKILTLPTTQKGTAKVIPGTGVRINYQDYWTDEFYRVENQSVPVRYDPLDYGVAYAYINNHWVKCLSNYHLRFQGYSEKAVAIATTICRQKRKQSNQSLYVGANELVSLLKNAEDYEELMLQIRKDQSAKLVYNLIEGNLSSAVLNPADIEHPFLQDDSKVDNNFSNLDEDILQPSLSTTTQSDNEDDDIGFYSNEELW

SEQ ID NO: 550 - protein, 371 aa, Cyanothece sp.
MTEKRLFSWELLEDSTENKLKYFKDVIIPHRNIKTILEQLLKNAIEPDDALVYLVFGVTGVGKSRLKAEFEKRLLRHFEAEIIANPGSLVVGGIEVDGAEGGKFNYSDYYIQVLESLQEVLIDYKENYEIDEDDNEDNLRGDHEGKNSKALRRTMQKVFTHRQLKAYTLDEAQHLFDVAGGRQINVQMNWLKSIANKTQTVHVLFGTYDLLKCQEVNGQVGRRSEDYYLPPYYLDNSDDQKEFKKAINTLQRHFPVENEPELNEKWEYFMEYSIGCIGILKSWWYRALKNALDDGAKTVRIKDFQARELSSGRRKTIKKELEDGERRLAALYFEEKAKKPKSESQASSKSSTRKVGERKAIRDLVGVNQEG

SEQ ID NO: 551 - protein, 329 aa, Cyanothece sp.
MSIYEEFWSSKPLKLPPRSRLFCLKPMGVGTCYTESLSSYVNRLAQEHCLTSQKLIMAEIAPLILKNEDKSDLLKKSVSHLLGNTDAKPVINGMREMTGELVRVLEQLTMRQDLRFLTLLSWKGMIYDRQLFKNYRAWCPCCLEEWKGEKKVIYEPLLWSFKDVEVCLLHKQRLIEECPHCNARLPVFARLSPVGFCSRCRGWLGDKKEEMEEVEPHRVNIEGIGDLIAVTPKMAYKPIPIELTRKLEVILLAFEEACGKDITLLGDLGVIMEQMRIATKQHQNKPYHLVKLVIPVCEKANIRVSELLLLNFKALSDRVFENLELGMRL

SEQ ID NO: 552 - protein, 463 aa, Cyanothece sp.
MDIDINKIQPYTNDELWSPEKFPMPPRSRLHHLQPMGIGTPMVESLTSYVTRLAHSHGVHVGTLIYKEIIPCISKTYKTTNLLCLRNQTGAINGCGLLAEDSVQALSELTLYQNLSNLTMLNWKNIFPNRKLIRNHKAWCPFCYQEWRTNNQIIFDPLIWQIEVIRLCSIHQYSLQTLCPSCKKSVSVLSPKNQLGYCSNCSNWLGNIEDYLNTSLSIHTKFKDKSYFLWIADCLGNLLSFPSTIKSPSKKQISQIIQAIIHQSTKGNIAEFARWANMPKNTVWMWVKGKSLPQLSRLLALCYLCRVDLLDSIINEGNITNMILHQKSIPSSVNERPKIFKNTLNHAQIHAALSEAFQETHPRPMTQVAKRLGISNKVLRRHFPELCKKISQRYLIYKKQSRLERIQKVCIEVEKAVKQLQQQGIYPSEQRVALHIGQPGCFRDKEVREVLNRTRRNWRLLDT

SEQ ID NO: 553 - protein, 221 aa, Cyanothece sp.
MTDTVINSEEHLDMIFKLRGAPIPLDNGYVIYSALCRICPTLHELKDVGIHPIAGIPTQNKFLELTPNSCLKIRIHHLQIPIIYPYLTGQTFEIGQESYQLNIPDYQAIRSSDSLYSRLVVIKGYQDSSSFLEAVQRQMDSLAIQGNVELLTRQNGTPQRRQLTIRKQGNEFKIRGFGVKISELSPEDSLTLQEQGIGGKRKMMCGIFVPATRPKDERKTP

SEQ ID NO: 554 - protein, 515 aa, Cyanothece sp.
MTVATQSKISLSLTACDTTIMHRAGMAGLYLTLKRLEEKYPDFRQREGNLSWSLTPDTIDLFWEAIDFSALDWLLKESFQLDDNGLICLTGLDDYSELRQKIELNEAIKAVFLRHNKFYQAGEAKKISFTVEEREVSYSYKPLIWYAHQTFAKELCDTDTQQLKQDYLQITSWLYLGGIVRHARADKKTKLEEKPEYALALLFVPVVCHYCLFHLPSEDVNSRKPHRYLVVIPEINNFEDASRRRWRLQQLEPQQLHVTNMSEAGLLYYSLDEIQANENYSQACQVWLYEKMNKASYQRVLTMVEEIEIDKEMITTYQQVKQYFQPNYQHIYPNNILIEVNLVRSLIAENLRQKQPWWFNFWKKLIDEDSKNYLFKQLLSNQKGVKFMTKNSERDEKYLAFIEVFQQAMRANFAKIYAKTERGKNPLFQKKAERLRAELNCCYDEISFQHYLADFLARGGLNKPLQGQKREVLLLIQQVPWEKLRIWALLGIASYEPKPKNLQELEGIKDESEEE

SEQ ID NO: 555 - protein, 323 aa, Cyanothece sp.
MNQKKNKIPNYYLYGTVLTRYGLASLSHGMRQGNKSILQKAYWDGKIHSLVGSSSLRWALRFYLQEEGYPVNRVWDKDEHINRLTDDNFNPDQFYDDDIFGFALLESVEEETVEDKTQPSTRRRGKRKKSGTTAQRTGALSMNNAISLTPYDGSLKLGAKSGRDKDSTSLHFTEYHNTRYQYYFGLNATHLKDCSRIFPLIDGIMDMPKVGGSANIFSYPFCPDSLVFQWTNHFASYISYCFESVDGKGRNIKLTQDFINEVECGQINPDELWIGGAIVNDLRELENFEKSLLKQIHLYRNRNELVADLKEVIKQDLGLKDSQ

SEQ ID NO: 556 - protein, 212 aa, Cyanothece sp.
MNTPLVIYLDVPFVTFREFHAREMGRTYPVPPPATVYGMLLSLVGETDVYRHCGVELAIAMLSEAKKSRILRQMRRFKQKDFSHAENVNPSYQEILSNLKCLIWVRSEAEMMQPSLKERIEFTFERPELVRRFGCLFLGESDQLIKTIRLVSEDYREGVRRWLIRDNGGRLTLPYWVDHLGSRNTRFLRYRVEEMNQLSPPDFAWTSIQSSV

SEQ ID NO: 557 - DNA, 627 bp, Cyanothece sp.
  source 1..627: mol_type = other DNA
tatctaattcggtgggttacggcaaggatgaaaatttattactttttccctaattgataaaaaccctctctcacctatcaattgcattcaaaatctgtttaataattttaggatggagaatttctccagaatgaaaaggaataaccactcgaatattatccttaaaataaattcggtgacttccttgagttcttaataaaataaaaccagcattaaggagtaacttttctgcttctttatcggttaatctcggaaatttaggcaacgttaacctctatactcattgttacaatttctcgattaagtaaattatgtttttccacctctgataaagtagataaatacagttcaatggcttcttgtatattgcgtttgacttcttctaaagtatctccttgactttgacacccttctagttgaggggagtaagcataataaccatcttcatctttttcgataataacactgatttgatacgacatctttgttaactgctagattcattctttcataataacatctctttggggtaaaactacctctatattcttatttcctcacccttctaactcagcaatattatttatttcatattgttcaatattgttttcattttgtttattttcg

SEQ ID NO: 558 - DNA, 121 bp, Cyanothece sp.
  source 1..121: mol_type = other DNA
actatttgacttaaaatttttcaggcatagctttgctgtcagattttcaggcataaccttgccgatgcggcaaaaacaaactttaaataatagaaagtctcgcagcatctcttaaaatggt

SEQ ID NO: 559 - DNA, 179 bp, Cyanothece sp.
  source 1..179: mol_type = other DNA
acacctaacggcataaagccacgaatcacgtcagttaattgggacgaaaatccctggatattttccttgagcaacgcctaacggcatgaagccatgaatcacatcgttgagcctctttaacacttagcccgattttttaaggattgagcaacgcctaacggcatgaagccatgaatcac

SEQ ID NO: 560 - protein, 920 aa, Nostoc sp.
MLYDVDFQAWCNSLPLSQQQRDLVNQIRTSPPARKVKGGGRNVHGPYASSKMGRTIQFESHTVELPAMTQFYEYDDQVLEYWDQPIKFSIKCSPQGKQATTISHYPDFFVMRKNCCGFEEWKTEKRLEKLSEEQPYRYQKIEKQWVDVIVQEYIESLGYYYRLRSDSEIDWVKYRNQKYLQPYKQGYLKQQYILNDQVEANVQEIIVNYPGINLTNLFEKAKNATIDDINTLIALEKVYVNLSEVALVEQEKVHLFRDQATAEAYITATHDYCEPVSSNVPIVELKVGSSFLLDGKSLTIDHIGESKIIFRGEQGIIRWTYAEFQQLIELGEISNLQTENHTTLDEEGWQYFLEASPKALETANYRYAAIKHFLGKEADNSQKYDLSERTLRDWRAKYRKAQQKYGCGFIGLIPQYKGNPTPRYSDEDLEFIDTVIEEQYETSKQKNVWQTYEFLKDEWQKVGRISPVPSHTFYYERVKKRNSYQQTKKRMGSRAANNLLGPWLIQPTTPRHGDRPLEIVHIDHTQLDVECICPYSGKNLGRPWVTGMIDAYSRRILALYLTFDNPSYRSCMMAIRICVQRFGRFPEWIVVDNGKEFSSTYFETLLARFEASKKHRPKDFPKFSSIIERWFGSQNTEFINNLRGNTQIMKHVRLVKKANNPKSLAVWNLEELYDYLAFGYAYGVYDKAEHPALEGMSPQKAFELGLAKTGHRPHQYIKYDEQFKILTLPTNNKGMAKVIPGQGIRVNYQNYWTDEFYSVENQCIPVRYDPLDYGVTYAYVNNHWVKCLSNYYMKFQGHSEKAVAIATTICRRKRQIYNQSQYVGSKEIVDLLNNAEEHEELILQIRRDQSAKLVFNLIEGKLSSAVLLNTLNTEQHSYQDSQAIEKNLDLIDLKEESLQPSLPKKFNPDDIKAFAEEELW

SEQ ID NO: 561 - protein, 372 aa, Nostoc sp.
MVTNRRFPQEFLQAPTDNKLKYFKDIIVPHRNIKLVLDQLLKNAIEPDDALVYLVFGVTGVGKSRLKAEFEKRLLKHFADEIISNPGSLVVGGIEVDGAEAGKFNYSNYYIQVLESLKEVLIDYKENYGVDLEDDNSDNLIGDHEGRNSKALRRTIQKVFLHRQLKAYTLDEAQHLFDVAGGRQINVQMNWLKSLANKTQTVHILFGTYELLKCQEVNGQVGRRSEDYYLPPYYLTKPEDQQEFIKVIKTLQQYLPVENEPQLEEHWEYFMKYSIGCVGILKSWWYRALKNALDEGAKTVRMKDFKARELSAGRRRTIQEELKAGESRLANLYTNEQKDENPEFTNSQPEKKGSKVGERKVGRDLVGVNQEG

SEQ ID NO: 562 - protein, 329 aa, Nostoc sp.
MSIYEEIWSPKSLEIPQRSRLFCLEPVAVGTPYTESLSSYLHRLAQAHCLTSQKLVMGEIAPLILKDEDKSELLVKNLSHLLGNSDAKPAINGMREMTGKLVTVLEELTMRRDLRFLTLLSWKGMIYDKGLFRNYRAWCPCCWQEWMQENKTIYEPLLWSFKNVEFCLIHKQRLVEECPRCGSRLPMIAKFSPAGFCSRCYGWLGQEIKGEAEIEKYRVNIQGISELIALTPQLGYKPIPIELTRKLQLILLVFEQAIGKDVKLLGDLGGVMESLRIASTRNQSQPYHLVKLIIPVCEKAKISVSQLFGSDFQELGKTLFGNFSLELKL

SEQ ID NO: 563 - protein, 458 aa, Nostoc sp.
MDIDIIQIQPYFEDELWSPEKFPMLERSRLHHLEPIGIGTPMVESLTSYVTRLAHSHGVFVNILLSRIVNPLLQQTFIKNSTSRGLKPFFNRSHALNGYGIMATDFVDVLNKLTLHNQLELLTLIPFSNILVTKGLLRSHKAWCPICYQHWKQKKQLIYDPLLWSFNDVKICLIHQHTLVQNCPHCHSQLLWLNWKSTLGYCSQCFQWLGGYSKTSVVDRERWIVENLGEFLTNANQLSSVLTQELIPKSFTHVVHKVSGDNIAAFAAMHKIPKNTFWGWYSGKTCPSLFALLQICYNLKISLFQFFTQDFNLSTNHCQNLKLDMKYSNKIRSSPKILDLDHIENTLTSILSQAKDPLPTIAEIAKQLKINRRVISRHFPLLSHQIVVKRRNYMGMCHLAAIEQCCQEIVEAIVSLHQSGEYPTESRVCELISNPGYFRYKKVRLFYKKTVQSILSRL

SEQ ID NO: 564 - protein, 220 aa, Nostoc sp.
VIATAINSEYYLDLTFKLRGAPIPLDNGYAVYSALSRICPSLHELKSIGIHPITGIPTRNNLLELTAQSRLKIRINHQQIPLIYPYLAGQAFHIGQNSYQLDIPDYKPLISSESVYSRLVIIKGFQDSNNFIEAVQRQLDNIGIQGKIELLTRQDGTPQKRQLTINKEEKKFEIRGFGVKISELNPEDSLTLQEQGIGGKRKMMCGIFVPATRSKEEEET

SEQ ID NO: 565 - protein, 511 aa, Nostoc sp.
MVATQPKISLSLGAADTTIIHRVGMTGLYMTLKQLEKQYPSSRQRGGHISWSLTADTIELFWQGSDFVAISWLINESFQLDDTGLIHLAGLDNNAIDLTQKIQIHEGMCAVFLRLNKFYQAGKLVNTELTFEEKKVEYQYKSLTWYAHQTFAEKLCDTDTQQLRQDYVQITSWLYLGGIVRHARTQNTTKLEEKPEYALALLFVPVVCHYCLLHIPSEDLKEKKTHRYLVVIPEIKDFEDASQRRWRLQQLETKQLHVSSLGEAGLLYYSLDDIQPQGDYYQACQVWLYEKMNKDSRQRTLMSIEEIKIDKNTLITYQQIQKYFPTNYQKIQPKQIFIKVNPIRSLIADNLVKGIHWWSNFWEKLVIDDSQGYLFNQLFFNREGFIIMAENSEEDKQYLIFIKVFQQAMKGNFAKMYAKAQEGKDPPIKKKVERLRAELNYCYDELSFKEYLSDFLVRGGLNKYFNQHQEEIVLLIKKIPWQELRIWSLLAIASYKPKNKLTKMNDDSEEE

SEQ ID NO: 566 - protein, 322 aa, Nostoc sp.
MMTQKKNDNNIPNYYLYGTVLTRYGLASLNHDMRRGNKTTLQKGYWNGKIHSFVGSSAIRWALRFYLQQQGYLVNRVWDEDEHINRLTSEDFDPEEFYDDDIFGFALLESAETEEEISTTKRKKKQTKASTLNQRTGALGMNMAVSLTPYDGAVKLGAKSGRDKDSTSLHFTEYHATRYQYYFGIDATHLRDFSRILPLIDGIMNLPKVGGSSNIFNYPFCPDSFVFQWTNNLPSYISYCFEYCEPKSKEARFTQEFIDEVECGQIDPSTLWIGGTIVKELHQLDNFDNSPFKQAHIYRNRNELAEALKAVIKRDLVLEESK

SEQ ID NO: 567 - protein, 212 aa, Nostoc sp.
MTAPLILYVDVPFATFRESHAREMGKTYPVPPPATVYGMLLSLVGETDVYRHCGVELAIAMLSSPKKSRILRQMRRFKNADFSNPENVIPCYQEVLSNLKCLIWIRSDGEKIKPSLRERIQLAFDHPELVRRFGCLFLGESDQLIKTIKLVSQDYLEGVRQWAIKDNRGRLTLPYWVDHVGSRNTRFLRYRIEEMPSSPPPDLAWTMIQSPI

SEQ ID NO: 568 - DNA, 714 bp, Nostoc sp.
  source 1..714: mol_type = other DNA
ctgggtaggtgtagttatttgtgccgacaatattgatccggaggtcggaattaccagtttcgcaggggctattttctagatgattggagaatagtgtggtgatgcggacagcaatgcggctatgatttacgctgccacctgtcatggcataaacttgaccgttgatcagttcgtgtttttctagttgctgttcttcccaagtgaaatattcttcgggggttagggtggggaagttttctttggttgcgatcatggtggggaaactcctgggttggatgactcgcacacttttatatagaaaaatctctgctgcactttgattttacacaaatagattgatccgtaatgccctacttttcatttaatattgcttgttcatcaaggaaagcttgtaataccaattcacaattcgcaatggacttcgtcccgcttcgctaacgcaattcgcaattgataaatcctgacttgacaaggttttctgggtttcgatctgtatcagaattttagtgaattggtattactgcttgtcgcagacatcgccgatgacccaggttaaaatcccttctcggaagtaatttactgctgtacacaaccaaattttgtgtttctagttcatctaattttccaacttctggtatgtctttgctaaaaaagagacgctgcaatccagcgtctcttctcacgatttattgatcaatctgaacctgatttaat

SEQ ID NO: 569 - DNA, 151 bp, Nostoc sp.
  source 1..151: mol_type = other DNA
acgaatggaaatggttgataattcacattgattttttcaaaatttttcaggcatgattttgccgttactgttttcaagcatagctttgccgttgcggcaaaatcaaactttaaatcacacgatgataaataatcaatcactgaaaaaatat

SEQ ID NO: 570 - DNA, 108 bp, Nostoc sp.
  source 1..108: mol_type = other DNA
ttgagcaacgcctaacggcaataagccacgaatcatccagtattgcgggagggtgattcttatccccaaaatttgagcaacgcctaacggcaataagccacgaatcat

SEQ ID NO: 571 - protein, 918 aa, Planktothrix sp.
MLSDTEFQAWCDRLQLSQQQRDWVNQIRTSPPVRKVKGSSRNVHGPYASKKMGRTIQFESHTVELPAIIQFYENDDSVLEYWDQPIKLTIKCSPQGKQATTIAHYPDFFVMKKNRCGFEEWKTEKKLDTLSKEQAYRYQNLEGKWVDIIVQEYIKSLGYYYSLRSDSEIDWVKYRNQKYLQPYKQGYLDQQYILDEQVEFHIKEIIINNPGINLTNLIKKAQNASIDDINTLMALEKVYVDLSAVALIEQDRVHLFRDQATAEAYITATHDYSEPVSSSVQIVDLKVGSSFLLDGKSVTIDHIGESKIILKGEQGIIRWTHAEFQQLVELGEISYLQTKEQTTLDEEGWQQYFIEASPKALEIANQRYQAIKPLLDGESYDSLDCNRPERTLREWKAKYRKAKQEHGVGLVGLIPQYKGNPTPRYSDEDLEFIDKVIEEHYETFKQKNAWQTYLILRDKWEESGLTSPIPSHTFYYERLKKRNSYKQTKRRMGSRAANSLLGPWLIKPTTPRHGDRPLEIVHIDHTQLDVQCVCPYSKKNLGRPWVTGMIDAYSRRILALYLTFDHPSYRSCMMAIRICVQRFGRFPEWIVVDNGKEFQSTYFETLLARFEASKKHRPKDVPKFSSIIERWFGSQNTEFINNLRGNTQIMKHVRLVKKENNPKNLAVWNLEELYDYLAFGYAYGVYDRSEHPALEGMSPQQAFESRLAKTGHRPHQYIKYDEQFKILTLPTNNKGTAKVIPGKGVRINYQDYWSDEFYSVENQSVPVRYDPLDYGIAYAYVNNHWVKCLSNYYMKFQGYSEKAVEIASTVCKRKQQRYNQSQYVGAKEIVDLLNNAEEHEEIMLQIRRDQSAKLVYNLIEGTLSSAVLNSGDIKQPSAPKTKEIEETILDREEEILQPSLSREINLDNIKPFADGDLW

SEQ ID NO: 572 - protein, 373 aa, Planktothrix sp.
MVIANNRPFPLEILHESTDNKLKYFKDVIVPHRNIRLILEQLLKNAIEPDDALVYLVFGVTGVGKSRLKAEFEKRLLKHFQDEIISNPGSLIVGGIEVDSAEGGKFNYSDYYIQVLESLKEVLIDYKENYGIDLENDNEDNLKGDHEGKNAKALRRTMQKVFLHRQLKAYTLDEAQHLFDVAGGRQINVQMNWLKSIANKTQTVHILFGTYELLKCQQVNGQVGRRSEDYYLPPYYLNKVEDQQEFIKVIKTLQQYLPVENAPQLEENWEYFMEYSIGCVGILKSWWYRALKNALDDQAKTVRMKDFKARELSAGRRKKIKEELEAGERLLASLYNDGNLKKIESTASSSPKKGRRVGERKVGRDLVGINQEG

SEQ ID NO: 573 - protein, 329 aa, Planktothrix sp.
MSIYSELWSPKPLEIPQRSRLFCLEPIAVGTPYAESLSSYINRLAQAHCLTSQKLVMGEIAPLILKDEDQSELLSKNLSHLLGNSDAKPAINGMREMTEKLVTVLEELTRRQDLRFLTLLSWKGMIHDQGLFRNYRAWCPCCWEVWKQEKKTVYEPLLWSFKDVEVCLIHKQRLVEVCPHCGSSLPVMARTSPAGFCSRCYGWLGQEIKGEEEIEKYRVNIQGISELIVLTPQLEYQPIPIELTRKLQLISLVFEQAIEKDLKFLGELGGIIESLKIASIQNQNQPYHLVKLIIPVCEKAKISISQLFLLNFKNFVEILFKNFAIELKL

SEQ ID NO: 574 - protein, 460 aa, Planktothrix sp.
MVMDINVAEIQPYTNDELWSPEKFPMPPRSSLHHLEPIGVGTPMVESLTSYMTRLAHSHGVFVSTLLSRVVNPLLQRTFIKNYTSRGLEPFFNRSHTLNGYGTIATDFIEVLNQLTLSNNLKFLTLSPFSNILVTKGLLRPYKAWCPICYKRWKQNQEVIYEPLLWSLNDVKVCLIHQHPLVQNCPHCHRQLLWLNWKSSLGYCSQCSQWLGGSSNTSIVTQQRWIADTLGELVANADRLSSVLTQERIQQSLTYIVHQVSEDNIAAFAAIHKIPKNTFWGWYSGKNRPPLSALTQICYNLKISLFQFLTQDFNLSAIPDRDQKVEMEYCKNTRSSARTLDFNHIENTLSLILSQAGESLPTIAEIAEQLQINRRLLSRHFPDLCHQIVTKRRNYVRMSHLTAIEHCCQEIKEAIALLHQSGEYPTESRVCELISNPGYFRYQKVRLLYKKEVQSMFSRL

SEQ ID NO: 575 - protein, 220 aa, Planktothrix sp.
MTAVSINSEEYLDLSFKLKGAPIPLDNGYPIYAAVSRICPSLHKLDSIGIHPIAGIPTSNNFLELTAQSRLKIRIHHQQIPLIYPYLTGQTFQLGQHSYQLDIPDYKPLTSSESLYSRLVVITGYQDPTTFIQAVQRKLDNLGIRGKIELLTRQDGTPQRRQLTINKQGKQFKVRGFGVKISELSPEDSLTLQEQGIGGKRKMMCGIFVPATRSKEEEEG

SEQ ID NO: 576 - protein, 524 aa, Planktothrix sp.
MIVATQPKISLSLHASDTTIMHRAGITGLYMTLKRLEAQYPSSHQRGAHISWSLTADTIELFWEGTDFVALSWLFKESFQLDDTGLIHLAGLDNDAADLSQKIQIHEGMCAVFLRLNKFYKAGKQVKTELTVEGKKVEYQYKSLTWYAHQTFADKLCETDTQQLKQDYVQITSWLYLGGIVRHARAQNMTKLEEKPEYALALLFVPVICQYWLLHLPSEDLKERKPHRYLVVIPEIKDFEDASQRRWRLQQLETKQLHVSSIGEAGLLYYSLDNIQPEGDYYQACQVWLYEKMNQSSHQRTLMSIEEIEINQNTLITYQRVQQSFQPNYEKIQPQKIFVKVNPIRSLIAENLVKGIPWWSDLWEKLVIEDTKGYLFNQLLYNRGGVIMMAENSEEDEQYLTFVKVFQQAMKGNFAKMYAKAEEGKEPPIKKKVERLRAELNSCYDKLSFQQYLSDFLVRGGLNKYFNENKESILLLIKKSHWEELRIWSLLAIASYKPKEKPNDTENSSSTNNQDLKEVSDESE

SEQ ID NO: 577 - protein, 169 aa, Planktothrix sp.
MNQNNNDDRMPNYYLYGTVLTRYGLASLNHGMRQGNKTILQKGYWNGKIHSFVSSSSIRWALRFYLQKQGYLVNRVWDENEHINRLTSEDFDPEQFYDDDIFGFALLESTETEEGTVTTKTRKKKAKLSSPNQRMGALGMNMAVSLTPYDGTLKLGAKSGREKDSTSLH

SEQ ID NO: 578 - protein, 62 aa, Planktothrix sp.
VECGQIDPDELWIGGPIVAELQQLADFDNSPFKKVHLHRNRNELIDALKTVIKRDLRLEEPK

SEQ ID NO: 579 - protein, 212 aa, Planktothrix sp.
MITPLILYLDVPFVTFRESHAREMGKTYPVPPPATVYGMLLSLVGETDVYRHCGVELAIAMLSNPRKSRILRQMRRFKNLNFSEPENVNPAYQEILSNLKCLIWVRSEGEKIQPSLRERLQLAFDRPELVQRFGCLFLGESDQLIKTIKLVSEDYLEGMRQWVIKDNQCRLTLPYWVDHVGSRNTRFLRYKIEERSSLSPPDLAWTMIRSPI

SEQ ID NO: 580 - DNA, 110 bp, Planktothrix sp.
  source 1..110: mol_type = other DNA
atctgagcaacgcctaacggcataaagccacgaatcacattaatcggttacggagatcgggttcagcttcgatctgagcaacgcctaacggcataaagccacgaatcaca

SEQ ID NO: 581 - protein, 182 aa, Anabaenopsis circularis
  source 1..182: note = NIES-21
MLHDVEFQAWCNSLRLSQQQRDLVNQIRTSPPARKVKGGGRNVHGPYASSKMGRTIQFESHTVELPAITQFYEYDDQVLEYWDQPIKFSIKCSPQGKQATTISHYPDFFVMRKNCCGFEEWKTEKKLEKLSEEQPYRYQKIERQWVDVIVQEYVESLGYYYRLRSDSEIDWVKYRNQKYLQP

SEQ ID NO: 582 - protein, 350 aa, Anabaenopsis circularis
  source 1..350: note = NIES-21
VLSTKRYRTIREISKPSTAQCNLEHYTLFLLSEPKHGGCSRLAEILGNVSHDSVNRFLLRERYDPYDLFEMVKTIINLTGGILSVDDTVIEKLYSNPKYAELIGYFWSGKYHKSIKGLNLITLYYSDIHGNSVPINYRIYDKKEGKTKNDYFQEMLIEVIDWGVKPRLVTGDSWYSGVENLKFLRNQKLGFLFGVEKNRTVSNEPGNYYQVSSLEIPDEGLVTHLREFGFIKLFRKVFKKEDSRHYILHLPDAEALQEITRSQFVTIHDTHWGIESFHRAIKQVCGICRFMVRDSHAIKTHIFCSLQAFVRLELMRSENIISNWYELQRNLFTLVVRDYIVDNLSNTCAA

SEQ ID NO: 583 - protein, 757 aa, Anabaenopsis circularis
  source 1..757: note = NIES-21
MCCLAHINDIFCQCVSPKPYKQGYLKQQYILNEQVEANVQEIIVNYPGINLTNLLEKAKNATIDDINTLIALEKVYVNLSEVALVEQEKVHLFRDKATAEAYITATHDYCEPVSSNVSIVELKVGSSFLLDGKSLTIDHIGESKIILRGEQGIIRWTYAEFQQLIELGEIINLQTENHTTLDEEGWQYFLEASPKALETANYRYAAIKPFLGKELDNSQKCDLSERTLRDWKAKYRKAQQKYGCGFIGLIPQYKGNPTPRYSDEDLEFIDEVIEEQYETFKQKNVWQTYELLRDKWQKSGRISPLPSHTFYYERVKKRNSYQQTKKRTGSRAANNLLGPWLIRPTTPRHGDRPLEIVHIDHTQLDIECICPYSGQNLGRPWVTGMIDAYSRRILALYLTFDNPSYRSCMMAIRICVQRFGRFPEWIVVDNGKEFSSTYFETLLARFEASKKHRPKDCPKFSSIIERWFGSQNTEFINNLRGNTQIMKHVRLVKKANNPKNLAVWNLEELYDYLAFGYAYGVYDKAEHPALEGMSPHKAFELGLAKTGHRPHQYIKYDEQFKILTLPTNNKGTAKVIPGQGIRVNYQNYWTDEFYSVENQSIPVRYDPLDCGVTYAYVNNHWVKCLSNYYMKFQGHSEKAVAIATTICRRKRQIYNQSQYVGSKEIVDLLNNAEEHEELILQIRRDQSAKLVFNLIEGTLSSAVLLNVSNTEQHSSHDSQKIEENLDLIDLKEEILQPSIPKKFNPDDIQAFAEEELW

SEQ ID NO: 584 - protein, 372 aa, Anabaenopsis circularis
  source 1..372: note = NIES-21
MVANRRFPQELLQATTDNKLKYFKDIIVPHRNIKLVLDQLLKNAIEPDDALVYLVFGVTGVGKSRLKAEFEKRLLKHFADEIISNPGSLVVGGIEVDGAEAGKFNYSNYYIQVLESLKEVLIDYKENYGVDLEDDNSDNLIGDHEGRNSKALRRTIQKVFLHRQLKAYTLDEAQHLFDVAGGRQINVQMNWLKSLANKTQTVHILFGTYELLKCQEVNGQVGRRSEDYYLPPYYLTKPEDQQEFIKVIKTLQQYLPVEVEPQLDEHWEYFMEYSIGCVGILKSWWYRALKNALDERAKTVRMKDFKARELSAGRRKTIQKELEAGESRLAFLYKNEEKIEKPESINSQSLKKGRKVGERKVGRDLVGVNQEG

SEQ ID NO: 585 - protein, 329 aa, Anabaenopsis circularis
  source 1..329: note = NIES-21
MSIDEEIWSPKPPEIPQRSRLFSLKPVAVGNPYAESLSSYLHRLAQAHCLTTQKLVMGEIAPLILKDEDKSELLAKNLSHLLGNSDAKPAINGMREMTTKLVTVLEELTMRQDLRFLTLLSWKGMIYDKGLFRNYRAWCPCCWEEWMQENKNIYEPLLWSFKDVEFCLIHKQRLVEECPHCGSRLPVMARFSPAGFCSRCYRWLGQEIKGEEEIEKYQVNIQGISELIALTPQLGYKPIPIELTRKLQLILLVFEQAIGKDLKLLGDLGGIMESLRIASTTNQSQPYHLVKLIFPVCEKAKISVSQLFESDFQELGKILFGNFSLELKL

SEQ ID NO: 586 - protein, 218 aa, Anabaenopsis circularis
  source 1..218: note = NIES-21
MNFLEIQFALRGKTLPADHGYALYSAVKKLLQESEDESLPNDLPPEVRLCSIPGINDRCGMIYLNRGSRFRLRCPSEQMQTWYRLLQNQVFEIRGHLIRLIQPRITLPEANEILVSRLVTFKLDAIDHADVPRYFLESCQKGLERLEIKGQAFIPSDINGDLARRTIQVKDKKIVGYGVVVEGLSEKDSLKLQWYGLGGRQHFGCGWFYPSQEEPNVN

SEQ ID NO: 587 - protein, 741 aa, Anabaenopsis circularis
  source 1..741: note = NIES-21
MSIKMQTLRPKLLLAKSMEVPWKGAYTLTGHTASVVEAVTTLIDTLGNQLLFQFGLSCCDLAQLRATARLAAYIHDLGKANDHFQAVVRKLKNPMEHPQLIRHEALSVLLAWELRDWLATGDGNFLIAIAAAGGHHLKLGGESGKQTDELGEIRESGVDAWTRGDRILLYTNHQHFIGLLRYGQKACGLASHLPQDLPTSWTIADIKQQRKILLQEFAIWEADSILTAVVKALLVAADSSGSALPVNNVPIQPWIQTQIHYTLTEPELQRVVDERLNGDMLHPFQKDLGNTTSRVTLARAGCGTGKTLGAYNWAKHHAVGRKLFFCYPTTGTSTEGFLDYTHDKVDSTLLHTRAAVDLEHLDLHSTGDEDDLETKLESFKAWSTKVSVCTVDTVLGLLQCNRRPMYCFPAIAQAAFVFDEVHCYDNKLFGALLRFLEVVKAPVLLMSASFLPWQIKAIETAVGEPINIIPGPKELETQPRYRFRLADAPDWERVKAEFEQGGKILWVCNQVNTAIAVYEEAKQYGLQPLLYHSRYKYGDRVNHHREVVDRFKAEGAVMAIATQVAEMSLDLSATLLVSQIADPAGLIQRLGRLNRRYCGHALDALFYPDEKVGFPYSQDELDAGAALIQSFSGEVCQADLALWLEKAAVQGEPDQDSVWLDGEWRTYPASLREAGYTITVLLEQDLKTVEKLPAKLLPRYTVPLIVNSKQTKGWKKCRRYPLAPTEFWGYSSDIGAFQIKS

SEQ ID NO: 588 - protein, 515 aa, Anabaenopsis circularis
  source 1..515: note = NIES-21
MTELVLSIFDPNTLLPHRAGIAGLALALSVIAPTDAPLQWEVTEDAVKLYWDSKDQEAVQWLLEQTYQIKRGLLIAPSLNLDEQGCFTFNQGMLASFLQHGQQKSFVEDPNKPKQGKKKFYKTQTLNFMIEPDSPEISVSYTLLDSCYYTESSKLAKDFSSGKPEVKTQILPGLEECFVNGSYKESSGSFLALLFLPLACGYYQLPNINSKSRSAIVIPEVQNLMEWVKLRKKLPSKTYANFGSSYGKFRASSAGESALRFLLDERQLDDSNLFKVSYCEVYQLGSQPWNANQSYIKQAVYRVPLKDDAINLYRIAYQNLKPKLRPKQDGEGFWLPESRVLAWISDNLISDRAWYVGFFEFRKAATIYLEDRRGLVVMTEHLSPDERILFDAVQGAFKKYRGQQIEQAKRQGRKPDWEQITNKVIYRLQRPSTQQEFAKALVEFLSQFRSKEALSSGPQIFWWLHQEANWRKARDLALLAVATYQGQSTEEKAEIEQDLTEEVTEETTEQTANVL

SEQ ID NO: 589 - protein, 282 aa, Anabaenopsis circularis
  source 1..282: note = NIES-21
MSQHLFATIVTSTAVAANNRGEGDGSTLSTLQKITRGNDQYTTVSAEAIRWGLREYLQNLDSKKVNRTFDPDKDVYNLKNERFSAKDFIDDDLFGYMDAKKGEKNEDATTKRRGALEVSRAISLDPFWGDIAFGSKGGAKGKTSIHSSEVHYTAYQYTIALTPETLKDPIRAALVLDAIGAVRHVGGNHARFLYDFRPESIVIRVTPDPSPWIMDIFKRMDDAVGCPKLLRLVEVRDVAASELIVAGEIADTPYGKQLEALEVKVCRGVKEAIAAAQELLKA

SEQ ID NO: 590 - protein, 227 aa, Anabaenopsis circularis
  source 1..227: note = NIES-21
MTSLLYIECPCTSFPRSFARDYKETYRYPPPSTIYGFLLSLVGEVDMMTHLGVKIAIGIIGDDPPISRIVRKQRHHKFSRAHLGTYPTSKFSKPNHQELLTDLRLVVHLDSSEEQSTIKLTERVAIALSTPEQITRFGGLSLGESWALVNGVRIYRETDGKIRWLVKDNRGLISLPVWIDRTTGQGTFFRFDFSDSFSEASWIQIQMPQLNPKSVRSKPSRLSKKSG

SEQ ID NO: 591 - DNA, 2989 bp, Anabaenopsis circularis
  source 1..2989: mol_type = other DNA; note = NIES-21
tctatttacgcctactggcatcacaggtttgggcagggcaacaatcaagcaattaacatgaatatggctgctgagtgctcaacgcctactggcatcacaggtttgggcaggactaacatggctcatatcttcaagataactattgcgtgctcaacgcctactggcatcacaggtttgggcagatattgaggccgggaacagaaattgatttatacgggtgctcaacgcctactggcatcacaggtttgggcagagtgcagtgcagaagcgatcgcactcagtattcaagtgctcaacgcctactggcatcacaggtttgggcagttccatgaacgtgtgcgagaaggataccaatggattgtgctcaacgcctactggcatcacaggtttgggcagtaatatccttgacaggcgtatggtataacgccgagtgctcaacgcctactggcatcacaggtttgggcagaaacaatcagatttaaggattttgactactccgggcggtgctcaacgcctactggcatcacaggtttgggcagtttataccctttcttccccgtctctagtccccaaggtgctcaacgcctactggcatcacaggtttgggcaggtaaattacatgaagttgcctttaatgtcttccagtgctcaacgcctactggcatcacaggtttgggcagtccagattcccataattccagttcttcgtcagttggtgctcaacgcctactggcatcacaggtttgggcagaaaagtctgcggaatgggttaaccaagctaaaaaagtgctcaacgcctactggcatcacaggtttgggcaggataggggaggtattgaggaaacagtttgctaaatagtgctcaacgcctactggcatcacaggtttgggcagctaaatattccaatctgtctatgcagcaacgaaatagtgctcaacgcctactggcatcacaggtttgggcaggtctgttgcttcgctgttatcagctaaccaatcatgtgctcaacgcctactggcatcacaggtttgggcagtaagtagtcaacatatttaggaatatcacttggaagtgctcaacgcctactggcatcacaggtttgggcaggacattctcagtggatgatcatcagggaaaagcttatcagtgctcaacgcctactggcatcacaggtttgggcagtacatacaactattgcctaagcagttcgagatactaggtgctcaacgcctactggcatcacaggtttgggcagtcaacgcaaatagtagatgattactcaataataaagtgctcaacgcctactggcatcacaggtttgggcagtgtaaatattggcgcaaccactcccggaacaggcggtgctcaacgcctactggcatcacaggtttgggcagaaagtgttttcaagagaacggggagacggccattatgtgctcaacgcctactggcatcacaggtttgggcagaaaactcttcctcgaagattcaagccattaaaggaatgtgctcaacgcctactggcatcacaggtttgggcagctcttttaattcccaatctgcttcttgtatttcagtgtgctcaacgcctactggcatcacaggtttgggcagttatatataatgactatgcaaaatataaatcttcctctagtgctcaacgcctactggcatcacaggtttgggcagctcacaggctgttttgatctcgttgatagactggttgtgctcaacgcctactggcatcacaggtttgggcaggcagggacggagcttattatcttgtcttgtcctactgtgtgctcaacgcctactggcatcacaggtttgggcagttagagtccgtaagtacgggcttcaattacaaagtgtgctcaacgcctactggcatcacaggtttgggcaggcaatggtgggggcggtggcggcggataatctggctgtgctcaacgcctactggcatcacaggtttgggcagtttatcccccgaagatgaggaatgtactgagaactcgtgctcaacgcctactggcatcacaggtttgggcagaaacctgccattgccgtaaactagtccaccattacgtgctcaacgcctactggcatcacaggtttgggcagaaagtcatcttcccggacaacagcaggagcaactctgtgctcaacgcctactggcatcacaggtttgggcagacgtttgttagccagaactctgaagttcttcgagaaggtgctcaacgcctactggcatcacaggtttgggcagtcgatttgtggttgccgcaccgaacgacagcaaacggtgctcaacgcctactggcatcacaggtttgggcagattttgctctacttgggttgataacactggtaaaccgcaacgtgctcaacgcctactggcatcacaggtttgggcagttcaaggttgtcgttatttggaacgagcttgtcatgtgctcaacgcctactggcatcacaggtttgggcagaagaccaaatatagattcaatctttcctccggaagtgctcaacgcctactggcatcacaggtttgggcagctagggagtaccaaggggtttatgattggtaacagggtgctcaacgcctactggcatcacaggtttgggcaggatgtcgaagcccagttcgagcgcgtcaaaagccgagtgctcaacgcctactggcatcacaggtttgggcagcccaaatgccagggtggaacctcaacattagttccgtgctcaacgcctactggcatcacaggtttgggcagggttagtattaactgttctccgtgccatatatgtatgtgctcaacgcctactggcatcacaggtttgggcagggcaactaggactaggcgatcgcgtgtggatttattgtgctcaacgcctactggcatcacaggtttgggcagaccagtaccagaattcccattcttccgattcacctaagtgctcaacgcctactggcatcacaggtttgggcag

SEQ ID NO: 592 - protein, 900 aa, Tolypothrix sp.
  source 1..900: note = PCC 7910
MKEQFEQWVARLQISEAGQKIIEKVRSSEPSRRVGGGSKNVAGRYPSRKMGVTIQFESHRVELPVIYQLEHDEDVLEFYDQPPQIKLDYQASNGRRLGVLHTPDLFVIRTNSAGWEECKTEQDLKKLAQKNPNRYFYSQEDNQWHCPPGEVYADQFGLYYRIRSDKEINWVLQRNLQFLEDYYRSESLGVEQAIAQSLLAIVSSQPGITLAELLHQQTGAKSDDIYTLIVQEQIYFDLNAAPLAEPERCLIFRDEQTASAYRLMVEQPNVSLPAISPVINIATGTPVSWDGKGLNIILVGETEVILGAENDQLIKFKKNVFEELVRQGEITSLQTPEKTDISTESWQRFYQASPEDQAEALERYKTIEPYLNGHPPENETIPARTIRDWKAKYLTALQKYGCGYIGLLSHRSVKGNRQRKLPEDTLAIMERFILEDYETLKQKRMLEVYGALVLACEQSSVIAPSYKAFTKEVKRRTGYEQTKKRQGRRAAYQYESFYWELTQKTPRHGDRPFEIGHIDHTQLDVELVCSRTGRNLGRPWATFLVDAYSRRLLAVYLTFDSPSYRSCLMVLRICVKRHGRLPQIVVVDNGTEFHSVYFETLLATFECTKKQRPPAKARFGSVCERLFGTSNTQFVHNLLGNTQITRNVRQVTKSVNPKNQAVWTLGLLYEYLCAWAYEVYDTDEHPALFQSPRDAFAAGMVTSGSRLHRMIPYDENFQILTLPTTSEGKAKVQVGRGVKINSIYYWSNSFRDPQIENTSVPTRYDPFNIGIAYAFVRGQWVQCISQYYSQLQGRSEKELKLASAELRKRSSNYGRQSQVSAKNLAEFLASVEAQETLLEQRSYDAEAREVFIVIEGGKAATSRNEQPKLIQVPFENTDTQVAEDEAITPETLVVYEEFSL

SEQ ID NO: 593 - protein, 383 aa, Tolypothrix sp.
  source 1..383: note = PCC 7910
MTQTNGFPLELLTRPAPERLAYFENYTVGHPRLKEVSEILMRTIAEPAGASFIFVYGPSGVGKTTLRLRVEQKLTELVLPLLESDRGRVPVVGVEAVAPESRNFNWKDYYTRALIALEEPLIDHKFDYGVRGISRDNFGKINVESKVVAPALRRALENALIHRHPDVFFVDEAQHFGKMASGYKLQDQLDCLKSLANMTGILHCLLGTYELLTFRNLSGQLSRRSVDIHFRRYCAENPEDVQAFKSVLLTFQQQMPLAEAPDLVSHWEYFYERTLGCVGILKNWLTRALKDALDREATTVTLKDLQKRAWSVAQCQRMFKEIQEGERQLSETETDIQNLRSALGLGAKPIVLPEETPKTTRPPGKVGKRKPKRDPIGVQQDVS

SEQ ID NO: 594 - protein, 465 aa, Tolypothrix sp.
  source 1..465: note = PCC 7910
MLANGLVTYESWDLKQLSIPSRSLLYQLQPVGIRTPMVESLTGYIERLAEAHCIPPDVLISRIITPLLKQIFLKSRTSRDLRSLFDRATAINGTGNIARDLVQALQKLTLIEDLHLLTLLFWCEIIPTRNLFRTQSAWCAVCYEEWSLNNQVIYKPLLWTINSVKVCALHKICLCLQCPHCQQELPLLSWRSRPGYCSKCGGWLGMNLPVKSASELMACSTLSKEELHSQTWIVEVIGELISSTLSFKSPPVKEEIAKSLSLLIDAVTDGNIAEFARLMGIPKNTLWMWQTGKALPVLDILLKICYRLEISLLDLLKPEQLAVKSFTKISHKTFRRSPTLRASPKLFDANQVQDALLAILASDKEPPLTMEEVATGLGYDRRTIFRHFPDLCRAISAKYRSYSKACHTEKIQQSCREVKQIVLKLHHQGEYPSEARVSEIMTNPGYLRYKQVRAALNETRRKIGF

SEQ ID NO: 595 - protein, 335 aa, Tolypothrix sp.
  source 1..335: note = PCC 7910
MVNPRGMTIYLEHWNLKPLEIPQRSRLFSLEPVAVGTPYAESLSSYLHRLAQAHCLTSQKLVMGEIAPLILKDEDKSELLSKNLSHLLGNSDAKPTINGMREMTGKLVTILEELTMRQDLRFLTLLSWKGMIYDKGLFRNYRAWCPCCWEEWMRENKTIYEPLLWSFKDVEFCVIHKQRLIEECPHCGSRLPIMAKFSPAGFCSRCYGWLGQEVKGEEEIEKYRVNIQGISELIALTPQLGYEPIPIELTRKLQLILLVFEQAIGKDLNLLGDLGRIMESLRIASKTNQNQPYHLVKLIIPVCEKAKISVSQLFGLDFQELGKILFGNFSLELKL

SEQ ID NO: 596 - protein, 220 aa, Tolypothrix sp.
  source 1..220: note = PCC 7910
MAALLIQSEEYVDLTFKLRGAPIPLDNGYVIYSALSRICPILHELDNIGIHPIAGIPTRNNLLELTAQSRLKVRIHHQQIPLIYPYLAGQTFHIGQNSYQLDIPDYKPLISSESVYSRLVIITGFQEPTNFIEAVQRKLDNKGIQGKIELLTRQDGTPQKRQLTINKQGKQFKVRGFGVRISELNPEDSLTLQEQGISGKRKMMCGIFVPATRSKEEEET

SEQ ID NO: 597 - protein, 525 aa, Tolypothrix sp.
  source 1..525: note = PCC 7910
MVATQPKISLSLDAADTTIMHRVGMAGLYMTLKRLEKQYPSSRQRGGHISWSLTADTIELFWQGSDFVALSWLIKESFQLDDTGLIHLTGLDNDAINLSQKIHIHEGICAVFLRLNKFYQAGEIVNTELTVEEKKVEYQYKSLTWYAHQAFAEKLCEADTQQLRHDYVQITSWLYLGGIVRHARTQNTTKLEEKPEYALALLFVPVVCHYCLLHIPSEDLKEKKPHRYLVVIPEIKDFEDASQRRWRLQQLETKQLHVSSLGEAGLLYYSLDDIQPEGDYYQACQVWLYEKMNQASRQRTLMSIEEIEIDKNTLITYQQVQKYFQPNYQKIEYKQIFIKVNPIRSLIADNLVTGIHWWSNFWEKLVIEDSKEYLFNQIFPNREGFIRMAENSEEDKHYLIFIKVFQQAMKGNFAKMYAKAEDGKDPPIKKKVERLRAELNYCYDELSFKEYLSDFLVRGGLNKYLNQNQAEILLLIKKLPWQELRIWALLAIASYKPKEKPISKDDSLTLNNQQLEEMNDESEEE

SEQ ID NO: 598 - protein, 322 aa, Tolypothrix sp.
  source 1..322: note = PCC 7910
MMSQKKNDNNIPNYYLYGTVLTRYGLASLNHDMRRGNKTTLQKGYWNGKIHSFVGSSAIRWALRFYLQKQGYLVNRVWDEDEHINRLTNEDFDPEQFYDDDIFGFALLESAEIEEETSTTKRKKKQTKTSTPHQRMGALAMNMAVSLTPYDGAVKLGAKSGREKDSTSLHFTEYHATRYQYYFGINATHLKDFSRILPVIDGIMNLPKVGGNSNIFNYPFCPDSLVLQWTNNFASYISYCFEYCDPQSKEAKFTQEFIDEVECGQIEPSQLWIGGTIVKDLQQLDNFDDSPFKKAHIYRNRNELIENLKTVITRNLGLEESK

SEQ ID NO: 599 - protein, 212 aa, Tolypothrix sp.
  source 1..212: note = PCC 7910
MTAPLILYLDVPFATFRESHAREMGKTYPVPPPATVYGMLLSLVGETDVYRHCGVELAIAMLSIPKKSRILRQMRRFKNADFSHPENVIPCYQEILSNLKCLIWVRSEGEKIQPSLRERIQLALDHPELVRRFGCLFLGESDQLIKSIKLVSQDYLQGVRQWVIRDNRGWLTLPYWVDHVGSRNTRFLRYRIEEIPSSPPPDLAWTMIQSPI

SEQ ID NO: 600 - RNA, 209 nt, Tolypothrix sp.
  source 1..209: mol_type = other RNA; note = PCC 7910
tggttcgaatccagttacgtccattgctattggtagagtgactaaaattatttatgtgactttacccataactttgccgcaacggcaagcttatggttccaatagagggcggcaaagttatgcttccaattttccatatgtagagaaagaagctaactaagtctaccctttttaagtttatagctttagaatccaattttacgtcgtgt

SEQ ID NO: 601 - RNA, 735 nt, Tolypothrix sp.
  source 1..735: mol_type = other RNA; note = PCC 7910
ttgttcgcaatgttctcaatggttaagaggatattatactacttcagtagttactcagaacagctcgatagccgaaagtctctaccctataccagcatgaaccgcttttgctccattctcaaaaaatcccgcgctttcctgctttctatgcttgcttggactcacggcaagcttatccttccaatttggactggcggcaaatttatggttccaaactgttaattacatccaaaattagctgacgcaagaatgagagttttagtgttgttgacggcaaagttatggttccagtagcggcaagcttatgggtgaagtcgcaatttatcaaggtttagcttgtgttttaaatcttccatctgttgtttgatataatctggcactggtgcaacttcatcctgtggttgttgcgttttaggcgcgctagatacttgtggtaacgatttagcatctttctcagcacactggcaataaacagttatgaaatacttttctaactggttaagtcggtactcttctgctttcttagtctacagaagtacaaatttatttatctccatctgcctacatcttcttgtatcggcgtttgatttattctttccatacctcgccaacaagggaatcactagatcccttaataaatatcaaatagataaaaatataacaaattttattctatcgtttgggtatttttccaatcatatcttattgtttaaattgcaagcatttgcgaataag

SEQ ID NO: 602 - RNA, 324 nt, Tolypothrix sp.
  source 1..324: mol_type = other RNA; note = PCC 7910
gtgattcgtggcttgatgccgttaggcgttgctcaacagatttatggttgaatgttgaacccattagccagcaggtgattcgtggcttgatgccgttaggcgttgctcaatctgaacaggacttagtgggatttgttgatttcttggtgattcgtggcttgatgccgttaggcgttgctcaagatttagttgatttggtagagactttttgtgattgggtgattcgtggcttgatgccgttaggcgttgctcaaaattgtataatttggggacaaaggtcaaaaccaagtgattcgtggcttgatgccgttaggcgttgctcaa

SEQ ID NO: 603 - protein, 917 aa, Chroococcus sp.
  source 1..917: note = FPU101
MLSDAEFQTWCDSLQLSQQQRDLVNQIRTSPPARRVKGGGRNVHGPYASSKMGRTIQFESHTVELPAITQFYEYDDTVLEYWDQPIKFSIKCSPQGKQATTIGHYPDFFVLRKNHCGFEEWKTEKRLEKLSEEQPYRYQKIEGQWVDVIVQEYLENLGYYYYLRSDSEIDWVKYRNQKYLQSYKQGYLKQLYIIDEQVEANLKEIIINYPGINFTTLLEKAKNATIDDINTLISLEKVYVNLSEVALVEQEKVHLFRDQATAMAYITASHDYREPISSSVQMVDLKVGSSFLLDGKSLTIDHIGESKIIVRGEQGIIRWQFAEFEQLVKLGEISNLQTESHTTLNEEGWQYFLEASPKALETANYRYAAIKPFLDGKPYNSQEENLSERTLRHWKAKYRKAQQEYGSGFIGLIPQHKGNSTPRYCDEDLEIIDQVIEEHYESFTQKNVWQTYEILKDRWKELRQISPLPSHTFYYERVKKRNSYQQTKKRMGSRAANNYLGPWLIRPTTPRHGDRPLEIVHIDHTQLDIQCVCPYSGKNLGRPWVTGMIDAYSRRILALYLTFDNPSYRSCMMAIRICVQRFGRFPEWIVVDNGKEFSSTYFETLLARFEASKKHRPKDCPKFSSIIERWFGSQNTEFINNLRGNTQIMKHVRLVKKANNPKNLAVWNLEELYDYLAFGYAYGVYDSTEHPALEGMSPQKAFELGVTKTGHRPHQYIKYDEQFKILTLPTNNKGTAKVIPGKGIRINYQDYWTDEFYSVENQSVPVRYDPLDYSVAYAYVNNHWVKCLSNYYMRFQGHSEKAVEIATTIGRRKRQSYNQSQYLGSKEIVDLLNNAEEHEELLLQIRRDQSAKLVYNLIEGKLSSAVLNAASIEYPSSQNNREIEKSILEIEEDVLPSSLSREINFDNIQAFAEEELW

SEQ ID NO: 604 - protein, 371 aa, Chroococcus sp.
  source 1..371: note = FPU101
MDKERRFPQEILQETTDNKLKYFKDVIVPHRNIRLILEQLLKNAIEPDDALVYLVFGVTGVGKSRLKAEFEKRLLKHFENEIMSNPGSLVVGGIEVDGAEGGKFNYSDYYIQVLESLKEVLIDYKENYTINFENDNEDNLIGDHEGKNAKALRRTMQKVFLHRQLKAYTLDEAQHLFDVAGGRQINVQMNWLKSIANKTQTVHVLFGTYELLKCQEVNGQVGRRSEDYYLPPYYLDKSQDQQEFIKVIKTLQQYLPVEDEPQLEERWEYFMEYSIGCVGILKSWWYRALKNALDDVAKTVRMKDFKARELSAGRRKTIQKELEAGESRLAYLYNEEKAIKPELTDSQPTKKGGKVGERKVGRDLVGVNQEG

SEQ ID NO: 605 - protein, 329 aa, Chroococcus sp.
  source 1..329: note = FPU101
MSIYEELWSPKLLEIPQRSRLFSLKPVGIGTLNTESLSSYLNRLAQEHCLTSQKLIMGEIAPLILINEDKSELLTKSVNHLLGNSDAKPAINGMRQMTRQLVTVLEQLTMRQELHFLTLLSWKGLIYDRGLFRNNRAWCPCCLEEWKQEKKTIYEPLLWSFKDVEVCLSHKQRLVDECPHCGSSLPVIAKSSSSGFCSHCYQWLGIETEGKEDIEKYRVNIQGIGELIALTPQLEYKPISIELTRKLQLILLVFEQAIGKNLKLLGELGKMMEQLKIATKQHQNKPYHLVKLIIPVCKKAKISVSQLFLANFKEFGEILFENFGLKLRL

SEQ ID NO: 606 - protein, 464 aa, Chroococcus sp.
  source 1..464: note = FPU101
MDIKLTQIQPYSEDELWSPEKFPMPERSRLHHLEPIGIGTPKVESLTSFVTRLANSHEVFPSILLSRVINPLLQQTFIKNYTSRGLKTFFNRSHALNGYGTIATDFSNVINQLTLHNQLQFLTLIPFSNILVTKGLLRPYKAWCPICYQEWKQNKHLIYDLLLWTLKDVTVCLIHQYPLIQNCPHCCRQIHWLSWKSNLGYCSYCSQWLGIAQNKAISNNSQIVNQERWMVNALGELLANAYQLSSLLTPEHIQKSFNIAVEKYTDGNIAAFAAMHQIPKNTCWGWYTGKNCPSLSALLQICYSLRLSLSQFLMQDFQQTATTLNKLTFERQSSKKARLSPQNFNLELIENTLTTILSQSSESLPTLIDVAKQLNINRRLLSRHFPELCRQIVDKRRHYQHLCHIASIDKCCLEIEEAIITLGKLGEYPTEARVCELISNPGYFRYKKVRLLYKKEVQSIIRSL

SEQ ID NO: 607 - protein, 221 aa, Chroococcus sp.
  source 1..221: note = FPU101
MIATHINSEEYLDLTFKLRGAPIPLDNGYIIYAALARICPPLHELNSIGIHPIAGIPTSNNFLELNEQSRLIIRIHHQQIPLIYPYLTAQTFQIGQESYQLNIPDYQPLIASESLYSRLVVITGFQNPSTFIEAVQRQLDNLGIQGKIELLTRQDGTPQRRQLTISKQGRQFKIRGFGIKISELNPEDSLILQERGIGGKRKMMCGVFVPATRTKEEEETQ

SEQ ID NO: 608 - protein, 524 aa, Chroococcus sp.
  source 1..524: note = FPU101
MIVATQPKISLSLDASDTTIMHRVGMTGLYMTLKRLEQKFPDSRNRAGHLSWLLTPDTIELFWAGSDVVALSWLMQESFQLDDRGLIQLAGLENDAMELEQKIHIHEGICAIFLRHNKFYKAGNQAKTKLTVESQEVEYQYKPLLWYAHQTFAQHLCEINTQQLKQDYLQFTSWLYLGGVVRHAMLEKVTKLEAKPEYAFALLFVPVVCHYWLLHFPSEDLKERKPHRYLVVIPEVNNFEEASQRRWRLQQLAVKQLHVSSIEEAGLLYYSLDEVQQDDNYYQACQVWLYEKMNKMSHQRTVMSIKEIDIDKDILITYQVVQQQFQPNYQHINSKKNLITVNSIRSLIAENLVRGLPWWSNFWEKLIVEDSKGYLFKQLLYNRRGVKFMVEGSEQKEKCLTFVNVFQHAMSVYFAKVYAKTDKGKEAPIEKRVERLRAELNCCYDELSFQQYLADFLARGGLNEYFYENKDRVLLIIEEVSWKKLRVWSLLAIASYKPKEKHTNTNENSSPDTQKLEGVNDESE

SEQ ID NO: 609 - protein, 323 aa, Chroococcus sp.
  source 1..323: note = FPU101
MNQNNNDNKILNYYLYGTVLTRYGLASLNHGMRQGNKTLLQKVYWYGKIHSLVSSSAIRWALRFYLQKKAYSINRVWDEDEHINRLTSEDFDPEQFLDDDIFGFALLESAETEGDASTTKKRKKQTKLSTPNQRMGALGMNMAVSLTPYDGTLKLGAKSGREKDSTSLHFTEYHATRYQYYFGINATHLKDPSRILPLIDGIMELPKVGGNSNIFNYPFCPDSFIFQWTSHFASYISYCFEACDGHGKGKQVKLTKDFIGEVECGQINPDDLWIGGSIVEELQQLENFKQSNLSKAHLNRNRNELIEALKAVIKRDLELEKSQ

SEQ ID NO: 610 - protein, 212 aa, Chroococcus sp.
  source 1..212: note = FPU101
MTTPLILYLDVPFATFRESHAREIGRTYPVPPPATVYGMLLSLVGETDIYRHCGIEIAIGMLSEPRKSQILRQMRRFKNANFSHPENVNPSYQEILSNLKCLIWLRSDGEKRQPSLRDRIQSAFDYPQLVKRFGCLFLGESDQLIKTIKIVSEEYPEGVRRWVIRDNRGRLTLPYWVDHVGIRNTRSLRYRVEEIDRLLPPDLAWTMIKSPI

SEQ ID NO: 611 - DNA, 209 bp, Chroococcus sp.
  source 1..209: mol_type = other DNA; note = FPU101
gctataatttaaagtttgtttttgccgaaatttaaagttagattttgccgacccattttttcaaaacctaataacttcaatatataaaatttttggtagaattttttttaaagcttgaatttgccgaaatagcaaatttaaagtttgacattgccgaaatagtctagactagctatgatgtttttattagtaagcttgttttaatttta

SEQ ID NO: 612 - DNA, 382 bp, Chroococcus sp.
  source 1..382: mol_type = other DNA; note = FPU101
tcctattcgacatttacaaatcaagctttacacattcttcattaaaaataaacctatctatactgttctaaggttgtactcttaagcaagaggtacattttagttatatttttatctcgctacagattcgacaaccgagttttctaggctgcctttaagtatgcaaggttttacgttaagctaaattcacactgcgtattgatgaacgatagaatcttcacaatagagatagttaataatgcacattatttttctcttaaatttttaaagcataatcttgccgctacatttttaaggcattactttgccgcaacggcaaaaacaaactttaaatgacagcctatcaacaaatgtatgctcaatatatatggacgtaactgga

SEQ ID NO: 613 - DNA, 463 bp, Chroococcus sp.
  source 1..463: mol_type = other DNA; note = FPU101
ttaaacaacgcctaacggcattaagccacgaatcgcatcgcctctcaacgtcctacacgccgacgggccagttgaacaacgcctaacggcattaagccacgaatcacttcttgctctaattgaagaattttttcaaggttactttgaacaacgcctaacggcattaagccacgaatcactcccaaaggtagcccgtttgacaatccgccctaacgttgaacaacgcctaacggcattaagccacgaatcacaccgtcactactaaatcaacaccatcgttacgcacttgaacaacgcctaacggcattaagccacgaatcacagtcagcaagctaagattagattatggattgggatcttgaacaacgcctaacggcattaaccacgaatcacatcaccaaattttctactgaataccgtaacaatagcttgaacaacgcctaacggcattaagccacgaatc

SEQ ID NO: 614 - protein, 899 aa, Nostoc sp.
  source 1..899: note = NMS9
MVNQIRTSPPARKVKGGGRNVHGFYASSKMGRTIQFESHTVELPAITQFYEYDDQVLEYWDQPIKFSIKCSPQGKQATTISHYPDFFVMRKNFCGFEEWKTEKRLEKLSGEQPHRYQKIEGQWVDVIVQEYIESLGYYYRLRSDSEIDWIKYRNQKYLQSYKQGYLNQEYILNDQIEANVQEIIVNYPGINLTNLLEKAKNATIDDINTLIALEKVYVNLSEVALVDQEKVHLFRDQATAEAYITVTHDYCEPVSSNVSIVELKVGSSFLLDGKSLTIDHIGESKIILRGEQGIIRWTYAEFQQLIELGEISNLETENHTTLDEEGWQYFLEASPKALEIANYRYAAIQPFLGKEADNSQKCDDLSERTLRDWKAKYRKAQQKYGCGFIGLIPQYKGNPTPRYSDEDLEFIDKVIKEQYETPKQKNVWQTYKFLEDKWQKEGRISPVPSHTFYYERVKKRNSYQQTKNRRGSRAANNLLGPWLIQPTTPRHGDRPLEIVHIDHTKLDVECICPYSGKNLGRPWVTGMIDAYSRKILALYLTFDHPSYRSCMMAIRICIQRFGRFPELIVVDNGKEFRSTYFDTLLARFDANKKHRPKDCPKFSSIIERWFGSQNTEFINNLRGNTQIMKHVRLVKKANNPKSLAVWNLEELYDYLAFGYAYGVYDKAEHPALEGMSPHKAFELGLAKTGHRPHQYIKYDEQFKILTLPTNNKGTAKVIPGQGIRVNYQNYWTDEFYSVENQSIPVRYDPLDYGVTYAYVNNHWVKCLSNYYMKFQGHSEKAVAIATTICRRKRQIYNQSQYVGSKEIVDLLNNAEEHEELILQIRRDQSAKLVFNLIEGNLSSAVLLNVSNIEQHSSQDSQTIEKNLDLIDLKEENSQPSIPKKFNPDEIQVFAEEELW

SEQ ID NO: 615 - protein, 372 aa, Nostoc sp.
  source 1..372: note = NMS9
MVTNRRFPQEFLQAPTDNKLKYFKDIIVPHRNIKLVLEQLLKNAIEPDDALVYLVFGVTGVGKSRLKAEFEKRLLKHFADKIISNPGSLVVGGIEVDGAEGGKFNYSDYYIQVLESLKEVLIDYKENYGVDLEDDNSDNLIGDHEGKNAKALRRTMQKVFLHRQLKAYTLDEAQHLFDVAGGRQINVQMNWLKSLANKTQTVHILFGTYELLKCQEVNGQVGRRSEDYYLPPYYLTKSEDQQEFIKVIKTLQQYLPVEDEPQLEEHWEYFMEYSIGCVGILKSWWYRALKNALDEGAKTVRMKDFKARELSAGRRKTIQKELEAGESRLAFLYKNEEKIEKPKSMNSQPVKKGRKVGERKVGRDLVGVNQEG

SEQ ID NO: 616 - protein, 329 aa, Nostoc sp.
  source 1..329: note = NMS9
MNIYEELWSPKPLEIPQRSRLFCLEPVGVGTPHTESLSSYLNRLAQEHCLTAQKLIMGEIALLILENEDKSKLLQKSVSYLLGNSDAKPAINGMREMTGKLVTVLEELTMRQDLRFLTLLSWKGMIYDKGLFRNYRAWCPCCWQEWMQENKTIYEPLSWSFKDVEFCLIHKQRLIEQCPHCGSRLTVMARFSPAGFCSRCYGWLGQEIKGEEEIEKYQVNIQGINELIALTPQLGYKPIPIELTRKLQLILFVFEQAIGKDVKLLGDLGVIMESLRIASTTNQSQPYHLVKLIIPVCEKAKISVSQLFGSDFKELGKILFGNFSLELKL

SEQ ID NO: 617 - protein, 458 aa, Nostoc sp.
  source 1..458: note = NMS9
MDIDIIQIQPYFEDELWSPEKFPVLERSRLHHLEPIGIGTPMVESLTSYVTRLAHSHGVFVNTLLSRIVNPLLQQTFIKNSNGRGLKPFFNRSHALNGYGIMATDFVEVINQLTLHNQLDFLTLIPFSNILVIKGLLRPHKAWCPICYQHRKQNKQIIYDPLLWSLNDVRVCLIHQHTLVQNCPHCHSQLLWLNWKSTLGYCSQCFQWLGGYSKTSVVTQERWIVENLGEFLTNANQLSSVLTQELIPKSFTHVVHKVSEDNIAAFAAMHKIPKNTFWGWYSGKTCPSLSALLQICYNLQVSLSQFLTQDFNLSTTHCQNLKLDTKYSKNIRSSPKTLDLDHIENTLTNILFQARDPLPTIAEIAKQLKINRRVISRHFPLLSHQIVVKRRNYMGMCHLAAIEQCCQEIREAIVSLHQSGEYPTESRVCELISNPGYFRYKKVRLFYKKTVQSILSSL

SEQ ID NO: 618 - protein, 220 aa, Nostoc sp.
  source 1..220: note = NMS9
MIATSINSEDYLDLTFKLRGAPIPLDNGYLTYAALSRICPPLHELKSVGIHPIAGIPTRNNLLELTAQSRLKIRIYHQQIPLIYPYLAGQAFHIGQNFYQLDIPDYKPLISSESVYSRLVIIKGFQDSTNFIEAVQRQMDNLGIQGKIELLTRQDGTPQRRQLTINKEGKQFKVRGFGVKISKLNLEDSLTLQEQGIGGKRKMMCGIFVPATRSKSEEET

SEQ ID NO: 619 - protein, 525 aa, Nostoc sp.
  source 1..525: note = NMS9
MVSTQPKISLSLHAADTTIMHRVGMTGLYMTLKRLEKQYPLSRQRGVHISWFLTADTIELFWEGSDFIALSWLINESFQLDDTGLIHLVGLDNDRIDLRQKIHIHEGICAVFLRLNKFYQAGEIINTELTFEEKQVEYQYKSLTWYAHQTFAEKLCEADTQQLRHDYIQITSWLYLGGIVRHARTQNTTKLEEKPEYALALLFVPVVCHYCLLHIPSEDLKERKPHSYLVVIPEIKDFEDASQRRWGLQQLETKQFHVSSLGEAGLLYYSSDDIQPEVGYYQACQVWLYEKTNKASRQRTLMSIEEIKIDKNILITYQQVQKYFKTNYQIIKYKQIFIKVNLIRSLIADNLVKGIHWWSNFWEKLVIEDSKGYLFNQLFSNREGFIIMAENSEEDKWYLIFMKVFQQAMKGNFAKIYAKAESGKDPPIKKKVERLRAELNYCYDELSFQEYLSDFLVRGGLNKYFNEHQEEIALLIKKTPWQELRIWSLLAIASYKPKDKPTNRDDSSLLNNQKLEDVNDESEEE

SEQ ID NO: 620 - protein, 321 aa, Nostoc sp.
  source 1..321: note = NMS9
MMSQKKNDNNIPNYYLYGTVLTRYGLASLNHDIRRGNKTILQKGYWNGKIHSFVGSSAIRWALRFYLQKQGYLVNRVWDEDEHINRLTSEYFDPEEFYDDDIFGFALLESAETEEEASTTKRKNKRTTVSTPNQRMGALGMNMAVSLTPYDGAVKLGAKSGREKDSTSLHFTEYHATRYQYYFGINVTHLKDVSRILPLIDGIMNLPVGGSSNIFNYPFCPDSLVFHWTNHFASYISYCFEYCDPKSKEAKLTKEFIDEVECGQIDHSKLWIGGTIVKELQQLDNFDNSLFKKAHIYRNRNELIEALKTVIKRDLGLEESK

SEQ ID NO: 621 - protein, 212 aa, Nostoc sp.
  source 1..212: note = NMS9
MIAPLILYLDVPFATFRESHAREMGKTYPVPPPATVYGMLLSLVGETNVYRHCGVELAIAMLSSPKKSRILRQMRRFKNANFSHPENVIPCYQEILSNLKCLIWVRSDEEKIQPSLRERIQLAFDHPELVRRFGCLFLGESDQLIKTIKLVSEDYLEGVRQWAIRDNRGRLTLPYWVDHVGSRNTRFLRYRIEKMPSSTPPDLAWTMIQSPI

SEQ ID NO: 622 - DNA, 333 bp, Nostoc sp.
  source 1..333: mol_type = other DNA; note = NMS9
gtaatttaaagcttggttttgccgtactttaaagtttgattttgccactacattgcctcaatcccagtaaatctgttccacgaatatccataatataagcagtttttaaagcctgagtttgccggaatagcaattttaaagtttgacattgccgaaatagtctgaacttgttatggtgtttttataggtaaaattgtactaattttagaggagataaccatgctctacgatgtcgagtttcaagcatggtgtgatagtttgcgactctcccaacagcaaagagatttggttaaccaaattaggacttccccaccagctcgtaaagtcaaagga

SEQ ID NO: 623 - DNA, 271 bp, Nostoc sp.
  source 1..271: mol_type = other DNA; note = NMS9
gactattctataagaaaacagttcaatctattttaagtagcttgtgaactttcagtaccaatggagatggttgataattcacattgattttttttcaaaatttttcaggcatgattttgccgttacagttttcaagcatagctttgccgttgcggcaaattcaaactttaaattacagacaaataattagtcactgtacaacaacaaatggacgtaactggattcgaaccagtgacctctacgatgtcaacgtagcgctctaaccaactga

SEQ ID NO: 624 - DNA, 251 bp, Nostoc sp.
  source 1..251: mol_type = other DNA
ttgggcaacgcctaacggcataaagccaagaatcacgtggtgttttggaagacttcccgggtatatcgccattgagcaacgcctaacggcataaagccacgaatcaccgattttagcccaactttaatgtgtgaaatgtgtgattgagcaacgcctaacggcataaagccacgaatcacgatagaatctgcggttaattttgctactccataaagttgagcaacgcctaacggcataaagccacgaatcac

SEQ ID NO: 625 - protein, 899 aa, Coleofasciculus sp.; identical to SEQ ID NO: 614
  source 1..899: note = FACHB-SPT36

SEQ ID NO: 626 - protein, 372 aa, Coleofasciculus sp.; identical to SEQ ID NO: 615
  source 1..372: note = FACHB-SPT36

SEQ ID NO: 627 - protein, 329 aa, Coleofasciculus sp.; identical to SEQ ID NO: 616
  source 1..329: note = FACHB-SPT36

SEQ ID NO: 628 - protein, 458 aa, Coleofasciculus sp.; identical to SEQ ID NO: 617
  source 1..458: note = FACHB-SPT36

SEQ ID NO: 629 - protein, 220 aa, Coleofasciculus sp.; identical to SEQ ID NO: 618
  source 1..220: note = FACHB-SPT36

SEQ ID NO: 630 - protein, 525 aa, Coleofasciculus sp.; identical to SEQ ID NO: 619
  source 1..525: note = FACHB-SPT36

SEQ ID NO: 631 - protein, 321 aa, Coleofasciculus sp.; identical to SEQ ID NO: 620
  source 1..321: note = FACHB-SPT36

SEQ ID NO: 632 - protein, 212 aa, Coleofasciculus sp.; identical to SEQ ID NO: 621
  source 1..212: note = FACHB-SPT36

SEQ ID NO: 633 - DNA, 418 bp, Coleofasciculus sp.
  source 1..418: mol_type = other DNA; note = FACHB-SPT36
agttcttacactcagcacttgcggtggtgtcgaatctggtggataaatcacatctacctgtgtaatttaaagcttggttttgccgtactttaaagtttgattttgccactacattgcctcaatcccagtaaatctgttccacgaatatccataatataagcagtttttaaagcctgagtttgccggaatagcaattttaaagtttgacattgccgaaatagtctgaacttgttatggtgtttttataggtaaaattgtactaattttagaggagataaccatgctctacgatgtcgagtttcaagcatggtgtgatagtttgcgactctcccaacagcaaagagatttggttaaccaaattaggacttccccaccagctcgtaaagtcaaaggaggaggaagaaacgttcatggtttc

SEQ ID NO: 634 - DNA, 370 bp, Coleofasciculus sp.
  source 1..370: mol_type = other DNA; note = FACHB-SPT36
aaccgagtcccgcgtgtgtgaactgattagtaaccccggctattttcgttataagaaggttcgactattctataagaaaacagttcaatctattttaagtagcttgtgaactttcagtaccaatggagatggttgataattcacattgattttttttcaaaatttttcaggcatgattttgccgttacagttttcaagcatagctttgccgttgcggcaaattcaaactttaaattacagacaaataattagtcactgtacaacaacaaatggacgtaactggattcgaaccagtgacctctacgatgtcaacgtagcgctctaaccaactgagctatacgtccttaaccacacaattattaatagtagc

SEQ ID NO: 635 - DNA, 251 bp, Coleofasciculus sp.; identical to SEQ ID NO: 624
  source 1..251: mol_type = other DNA; note = FACHB-SPT36

SEQ ID NO: 636 - protein, 935 aa, Coleofasciculus sp.
  source 1..935: note = FACHB-SPT36
MLRYFYRQLEAILGRIAMLSDGEFQAWCDRLQLSQQQRDWVNQIRTSPPVRKVKGSSRNVHGPYASKKMGRTIQFESHTVELPALIQFYENDDSVLEYWDQPIKFTIKCSPQGKQATTISHYPDFFVMRKNQCGFEEWKTEKKLSKLSKEQAYRYQNLEGKWVDIIVQEYVENLGYYYSLRSDSQIDWVKYRNQKYLQPYKQGYLHQQYILDEQVEFHIKEIIINNPGINLTNLLKKAENATIDDINTLIALEKVYVDLSAIALVEQERVHLFRDQATAEAYITATHDYSEPVSNSVQIVDLKVGSSFLLDRKSLTIDHIGESKIILRGEQGIIRWTHAEFQQLVELGEITCLQTKEQKTLDEEGWQQYFREASPKALEIANQRYQAIKPLLDGESYDSLDCNVPERTLRQWKAKYRKAKQEYGVGLVGLIPQYKGNPTPRYSDEDLEFIDKVIEEHYETFKQKNAWQTYLMLRDKWEESGLNSPIPSHTFYYERLKKRNSYQQTKRRMGSRAANSLLGPWLIKPTTPRHGDRPLEIVHIDHTQLDVQCICPYSKKNLGRPWVTGMIDAYSRRILALYLTFDHPSYRSCMMAIRICVQRFGRFPEWIVVDNGKEFQSTYFETLLARFEASKKHRPKDVPKFSSIIERWFGSQNTEFINNLRGNTQIMKHVRLVKKENNPKNLAIWNLEELYDYLAFGYAYGVYDRAEHPALEGMSPQQAFELGLAKTGHRPHQYIKYDEQFKILTLPTNNKGTAKVIPGKGIRINYQDYWSNEFYSVENQSVPVRYDPLDYGVAYAYVNNHWVKCLSNYYMKFQGYSEKAVEIASTVCRRKQQKYNQSQYIGFKEIVDLLNNAEDHEEIMLQIRQDRSAKLVYNLIEGTLSSAVLNSVDIKQPSEPKTKEIEEAIFDREEAVLQPSLSREINLDNIQPFADEELW

SEQ ID NO: 637 - protein, 371 aa, Coleofasciculus sp.
  source 1..371: note = FACHB-SPT36
MTNNRPFFLEILQQSTENKLKYFKDVTVPHRNIKLILDQLLKNAIEPDDALVYLVFGVTGVGKSRLKAEFEKRLLKHFEDEIISNPGSLIVGGIEVDSAEGGKFNYSDYYIQVLESLKEVLIDYKENYGIDLENDNEDNLTGDHEGKNAKALRRTMQKVFLHRQLKAYTLDEAQHLFDVAGGRQINVQMNWLKSIANKTQTVHILFGTYELLKCQQVNGQVGRRSEDYYLPPYYLNKVEDQEEFFKIIKTLQQHFPVENAPQLEKNGEYFMEYSIGCVGILKSWCYRALKNALDDKAKTVRMKDFKARELSAGRRNKIKEELEAGERLFASLYNDGNLKKTEATDSSSPKRGGRVGERKVGRDLVGINQEG

SEQ ID NO: 638 - protein, 329 aa, Coleofasciculus sp.
  source 1..329: note = FACHB-SPT36
MSIYSELWSPKPLKIPQRSRLFSLEPVAVGTPYTESLSSYLNRLAQEHCLTSQKLIMGEIAPLILKDEDKSELLAKNLSHLLGNSDAKPAINGMREMTGKLVAVLEELTMRQNLRFLTLLSCKGMIYDRGLFRNYRAWCPCCWEEWKQENTTIYEPLLWSFKDVEVCLIHKLRLREECPHCGSRLPVMARLSPAGFCSRCYEWLGQEIKGEEEIEKYRANIQGISELIALTPQLGYKPIPIELTRKLQLILLVFEQGIGKDLKLLGDLQGIMESLRIASTRNQSQPYHLVKSIIPVCKKAKINIAQLFFSNYKELGEILFRNFNLEFRL

SEQ ID NO: 639 - protein, 458 aa, Coleofasciculus sp.
  source 1..458: note = FACHB-SPT36
MDINVIEIKPYTNHELWSPEKFLMPPRSPLHHLEPIGVGTPTVESLTSYVTRLAQSHGVFVSTLLSRIVNPLLQRTFIKDSTSRGLEPFFNRSHVLNGYGTIATDFVEVLNQLTLSNKLKFLTLISFSNILVAKGLLRPYKAWCPICYEHRKKNLEVIYEPLLWSLNDVKICLIHQHPLVQDCPHCYRQSPWLNWKSSLGYCSQCSQWLGGGSNTSVVTQERWIAETLGELVANAEQLSSVLTQEHIQKSFTHVVHQVTEGNIAAFAAMHKIPKNTFWGWYCGKNCPPLSALIQICYNFKISLSQFFTQDFNLSTIHARKLKVEMEYSKKTRSSPRTLDLNHIENTLSIILSQVEEPLPTITEIAEQLKINRRVLSRHFPVLCHKIVTKRRNYMRMSHLAAIEQCCQEIKEAIVSLQRSGEYPSESRVCELISNPGYFRYQQVRLLYKQELQSTLSSL

SEQ ID NO: 640 - protein, 220 aa, Coleofasciculus sp.
  source 1..220: note = FACHB-SPT36
MTANFINSEEYLDLTFKLRGSPIPLDNGYPIYSALSRICPPLHELDSIGIHPIAGIPTSNNFLELTAQSRLKIRIHHQQIPLIYPYLAGQAFQLGQHFYQLDIPDYKPLISSESVYSRLVLIKGFQDPTNFIEAVQRQLDSLGIQGKIELLTRQDGTPQRRQLTINKEEKQFKVRGFGVKISELNSEDSLTLQEQGIGGKRKMMCGIFVPATRSKEEEET

SEQ ID NO: 641 - protein, 525 aa, Coleofasciculus sp.
  source 1..525: note = FACHB-SPT36
MVTTQPKISLSLDAADTTIMHRAGMTGLYMTLKRLEKQYPSFHQRGGHISWFLTADTIELFWQGSDFVALSWLIKESFQLDDTGLIHLTGLDNDGINLRQKIHIHEGICAVFLRHNQFYQAGAIVNTELKVEEKKVEYQYKSLIWYAHQSFAEKLCEVDTQQLRQDYVQITSWLYLGGIVRHARTKDTTKLEEKPEYALALLFVPVVCHYCLLHIPSEDLKEKKPHCYLVVIPEIKDFEDASQRRWQLQQLETKQFHVGSLGEAGLLYYSLDDIQPEGDYYQACQVWLYEKMNQTSRQRTLMSIEEIKIDRNTLITYQQVQKYFQTNYQKIKPKQIFIKVNLIRSLIADNLVKGIHWWSNFWEKLVMEDSKGYLFNQLFFNREGFTIMAEKSEEDKQYLIFVKVFQQAMKGNFAKIYAKTEEGKKSPIKKKVERLRAEINYCYNELSFQEYLSDFLVRGGINKYFNEQQEEILLLIKNSPWQKLKIWSLLAIASYQPKDKPAKGDDSSFPNNQKLGEMNDESEEE

SEQ ID NO: 642 - protein, 318 aa, Coleofasciculus sp.
  source 1..318: note = FACHB-SPT36
MMSQKKNNNNIPNYYLYGTILTRYGLASLNHDIRRGNKTTLQKGYWNGNIHSFVGSSAIRWALRFYLQKQGYLVNRVWDEDENINRLKSEDFDPGQYYDDDIFGFALLESAETEEDTSTTKRRKKQKKVSSPNQRMGALGMNMAVSLTPYDGAVKLGAKSGREKDSTSLHFTEYHATRYQYYFGINATHLKDFSRILPLIDGIMNLPKVGGSSNTFNYPFCPDSLVFQWTNNFASYISYCFEYCDPKSKEAKLTEEFIDEVECGQIDPNQLWVGGTIVKELQQLDNFDNSPFKNAHIYRNRNELIEALKAVIKRDLGL

SEQ ID NO: 643 - protein, 212 aa, Coleofasciculus sp.
  source 1..212: note = FACHB-SPT36
MIAPLILYLDVPFATFRESHAREMGKSYPVPPPATVYGMLLSLVGETDVYRHCGVELAIAMLSTPKKSRILRQMRRFKNADFSHPENVIPCYQEIVSNLKCLIWVRSDGEKIQPSLRERIQLAFDHPELVRRFGCLFLGESDQLIKTIKLAREDYLEGVRQWAIRDNRGSLTLPYWVDHVGSRNTRFLRYRMEEISSSSPPDLAWTMIQSPI

SEQ ID NO: 644 - DNA, 320 bp, Coleofasciculus sp.
  source 1..320: mol_type = other DNA; note = FACHB-SPT36
atactagatactgaaccttgacaatataatacataaataacagcgccgcagttcatgcttttaacagccgctgtgtcatttaaagtttgattttgccgtaatttaaagccaggttttgccgccccattctctcaaagcctcataaacccgttgtatgaatattctagcaagatagccttttaaagcctgattttgccgaaatagtatttttaaagtttgatattgccgaaatagacggggcttgttacgatatttttatcgtcaacttgaagcgattttagggaggatagccatgctctccgatggtgaatttcaagcat

SEQ ID NO: 645 - DNA, 320 bp, Coleofasciculus sp.
  source 1..320: mol_type = other DNA; note = FACHB-SPT36
atcagcaggttcggctactctataagcaagagcttcaatctactctaagtagcttgtgagctttcagtgtgaatgaggatagtcgatcgtctacatctattttctcgtcatttttttcaggcatagttttgccgctatggttttcaggcataactttgccggagcggcaaaatcaaactttaaatgacaaagccacctatagcggcaccaaaaaaaataatggacacaactggattcgaaccagtgacccccacgatgtcaacgtggtgctctaaccaactgagctatgcgtccgtccgacgatttataaatgtagcata

SEQ ID NO: 646 - DNA, 255 bp, Coleofasciculus sp.
  source 1..255: mol_type = other DNA; note = FACHB-SPT36
gctgagcaacgtctatagacatgaagccacgaatcactcggaggaggttaagataataacagcgccgcagttctgagcaacgcctaacggcataaagccacgaatcacaagtgaaaagagagtttatcgatcctctgcaaccgtatctgagcaacgcctaacggcataaagccacgaatcactgcctttacttacaatctgccaaaagcacttccagctctgagcaacgcctaacggcataaagccacgaatcac

SEQ ID NO: 647 - protein, 898 aa, Mojavia pulchra
  source 1..898: note = JT2-VF2
MKEQFEQWVACLQISEAGQKIIEKVRTSEPSRRVGGGSKNVSGRYPSRKMGVTIQFESHRVELPIIYQLEHDEDVLEFYDQPPQIKLDYQASNGRRLGVLQTPDFFVIRTNSAGWEECKTEQDLKKLAEKNPNRYFCSQEDNQWHCPPGEVYANQFGLYYRIRSDREINWVLQRNLQFLEDYYRSESLAVEETIAQSLLAIVSSQPGITLAELLNQPTGAKSDDIYTLIAQEQIYFDLNAAPLAEPERCLIFRDEQTASAYRLMVEQPSVHLPAISPVINLATGTPVSWDGKGLNIIHVGETEVILSAENNQLIELKKAIFENLVRQGKITSLQTPEKTAISTESWQRFYQASPEDQAEALERYRTIEPYLNGHPPENETIPARTIRDWKAKYLTAHQKYGCGYIGLLSHRSVKGNRQRKLPEDTLAIMEKFILEDYETLKQKRMWEVYGALVRACEQSGVIAPSYKAFTKEVKRRTGYEQTKKRQGRRAAYQHESFYWELSQTTPRHGDRPFEIGHIDHTQLDVELVCSRIGRNLGRPWATFLVDAYSRRLLAVYLTFDSPSYRSCLMVLRICVKRHGRLPQIVVVDNGTEFHSVYFETLLATFECTKKQRPPAKARFGSVCERLFGTSNTQFVHNLLGNTQITRNVRQVTKLVNPKNQAVWTLGLLYEYLCAWAYEVYDTDEHPALFQSPRDAFAAGMAIGGSRIHRMIPYDENFQILTLPTTSEGKAKVQAGRGVKINSIYYWSNSFRDPQIENTSVQIRYDPFNIGIAYAFVRGQWVQCISQYYAELQGRSEKELKLASAELRKRSSNHGRQSQVSAKNLAEFLASVEAQEALLEQRSYDAEAREVFRVIEGGKATTSRNEKPKVIQVPFENTDTQVAEDEAIVPETLVVYEEF

SEQ ID NO: 648 - protein, 383 aa, Mojavia pulchra
  source 1..383: note = JT2-VF2
MTPTTGFPLELLTRPAPERLAYFENYTVAHPRLKEVYEILMRTIAEPAGASFIFVYGASGVGKTTLRLRVEQKLTELALPKLESDRSRVPVVGVEAVAPESRNFNWKDYYTRALIALEEPLIDHKFDYGVRGISRDNFGKINVESKVVAPALRRALENALIHRHPDVFFVDEAQHFGKMASGYKLQDQLDCLKSVANMTGILHCLLGTYELLTFRNLSGQLSRRSVDIHFRRYCADNSDDVQAFKSVLLTFQQQMPLAEHPDLVTHWEYFYERTLGCVGILKNWLTRALKDALDREATTITLKDLQKRAWSVAQCQRMFKEIQEGERQLSETETDIQNLRSALGLGAKPIVLPEETPKTTRPPGKVGKRKPKRDPIGVQQDVS

SEQ ID NO: 649 - protein, 329 aa, Mojavia pulchra
  source 1..329: note = JT2-VF2
MTIYSENWNLKPPEIPQRSRLFSLEPVAVGAPYAESLSSYLHRLAQAHCLSSQKLVMGEIAPLILKDEDKSELLEQNLSHLLGNSDAKPAINGMREMTGKLVTVLEELTMRQDLRFLTLLSWKGMIYDKGLFRNYRAWCPCCWQEWKQENKTIYEPLLWSFKDVEFCLIHKQRLIEECPHCGSRLPVMARLSPAGFCSRCYGWLGQEIKGEEEIEKYQINIQGISELITLTPQLGYKPIPIELTRKLQLILLVFEQAIGKDVKLLGDLGGIMESLRIASTRNQSQPYHLVKLIIPVCEKAKITVSQLFGSDFKELGKILFGNFSLELKL

SEQ ID NO: 650 - protein, 455 aa, Mojavia pulchra
  source 1..455: note = JT2-VF2
MLASVLETYESWDLKKLSIPSRSRLYQLQPVGIGTPLVESLTGYISRLAEAHCVNPGVLMEKQLATLVNKEYGGANLHRIYNYTTALNGSGVMAKDLVQALQKLTLRDDLCFLTLLTWDKLFPSRNLLRSVRAWCPSCYQEWYEKKQLIYEPLLWSLDVVKICPYHHHQLICECPHCHQKNTTLAWRSQPGYCSKCGEWLGLILSQESANRNALKKNELEQKIWSAKALGELIAATPYLNDALSPTTIALTLSKWVEQIAEGNIAEFARQINVPRNTVWLWCKGKNLPSLEALTNICYCFGVSILSFLTEENNNLSLSKKLGATEAKTTLRTRNKPFNAERVKFYLEELLKNDESPPLSMEEVARQLEVNRKTIYKHFPDLCRAISAKYDSYQKDYHKKIIEECCQEVRLVAFELHNQGKYPTESAVSELVSRPGYFRYKKVRLALREANRELEL

SEQ ID NO: 651 - protein, 220 aa, Mojavia pulchra
  source 1..220: note = JT2-VF2
MAAILIQSEEYVDLTFKLRGAPIPLDNGYVIYSALCRICPILHELESIGIHPIAGIPTRNNLLELTAQSRLKIRIHHQQIPLIYLYLAGQAFHIGQNSYQLDIPDYKPLISSESVYSRLVIITGFQDSTNFIEAVQRQLDNKGIQGKIELLTRQDGTPQKRQLTINQKGKQFKVRGFGIKISSLNPEDSLTLQEQGIGGKRKMMCGIFVPATRSKEEEET

SEQ ID NO: 652 - protein, 525 aa, Mojavia pulchra
  source 1..525: note = JT2-VF2
MVATQPKISLSLNAADTTIMHRVGMTGLYMTLKRLEKQYPSSRQRGGHISWSLTADTIELFWQGSVFVALSWLIKGSFQLDDTGLIHLTGLDNDAIDLSQKIHIHEGMCAVFLRHNQFYQAGEIVNTELKFEEKKVEYQYKSLTWYAHQTFAEKLYEVDTQQLRHDYVQITSWLYLGGIVRHARTQNTTKLEEKPEYALALLFVPVVCHYCLLHIPSEDLKGKKPHRYLVVIPEIKDFEDASQRRWRLQQLETKQLHVSSLGEAGLLYYSLDDIQLEGDYYQACQVWLYEKMNQASRQRTLMSIQEIEIDKNTLITYQQVQKYFQANYQKIKPKQIFINVNPIRSLIADNLVTGIHWWSNFWEKLVIEDSKEYLFNQIFPNREGFIRMAENSEEDKQYLIFIKVFQQAMKGNFAKMYAKAEEGKDPPIKKKVERLRAELNYCYDELSFKEYLSDFLVRGGLNKYFNQHQEEISLLIKKSPWQELRIWSLLAIASYKPKDKSTSGDDSLSTNNQKPEEVNDESEEE

SEQ ID NO: 653 - protein, 322 aa, Mojavia pulchra
  source 1..322: note = JT2-VF2
MMSQKKNDNNIPNYYLYGTVLTRYGLASLNHDIRRGNKTILQKGYWNGKIHSFVGSSAIRWALRFYLQKQGYLVNRVWDEDEHINRLTSEDFDPEQFYDDDIFGFALLESAETEEETSTTKRKKKQKKTSTPNQRIGALAMNMAVSLTPYDGAVKLGAKSGREKDSTSLHITEYHATRYQYYFGINATHLKNYSRILPLIDGIMELPKVGGSSNIFNYPFCPDSLVLQWTNNFASYISYCFEYCEPKSKEAKFTKEFIDEVECGQIDPSQLWIGGTMVKELQELDNFENSTFNKAHIYRNRNELIEDLKTVIKRDLGLEESK

SEQ ID NO: 654 - protein, 212 aa, Mojavia pulchra
  source 1..212: note = JT2-VF2
MIAPLILYLDVPFATFRESHAREMGKTYPVPSPATVYGMLLSLVGETDVYRHCGVELAIAMLSSPKKSRILRQMRRFKNADFSHPENVIPGYQEILSNLKCLIWVRSEGEKIQPSLRERIQLAFDHPELVRRFGCLFLGESDQLIKSIKLVSQDYLGGVRQWVIRDNRGRLTLPYWVDHVGSRNTRFLRYRIEEMSSSPPPDLAWTMIQSPI

SEQ ID NO: 655 - DNA, 209 bp, Mojavia pulchra
  source 1..209: mol_type = other DNA; note = JT2-VF2
tcagcggttcgaacccgcttagctccatcccttaataactactatcccgcattaaattttgtgactttacccataactttgccgcaatggcaagcttatggttccagtagaaggcggcaaagttatggttccaatttctgggtaatttttaagcttcataactcaagttcgcgattcgcttctctaagagctaatctaacttttttgta

SEQ ID NO: 656 - DNA, 653 bp, Mojavia pulchra
  source 1..653: mol_type = other DNA; note = JT2-VF2
ctaatttggttagactagcaatccagtttaggctattgttcgcaatgttctcaatggttaggaggatattatactactccagtagttactcacaacagttcgatagccgaaagtctctatcccataccagcatgaaccgcttctgctcccttctaaaaaaatccggcgctttcctgctttctatgcttaattggactcacggcaagcttatccttccaactgggacttgcggcaaatttatggttccaaactggcaattgcatccaaaattagctgacgcaagaatgagggttatagtgacattgacggcaaagttatggttccagtagcggcaaagttatgggtaaagtcacaaaattttgtggcaacttatgcttgttgtcacaaaatcgcagtttatgcttgtaagtctcggtagtgtgcatgatgctaaatcgcatggctgtactctaaatgtgctgttttcaatcatttggagcaagcgaataaccataatgacaggcattatggaaaaaggttgaatttaatggcttattggctgttattcagttctataaataactctcagtatcatgactattgctcagtccgatcgccgtctcctgactgcgctaaaagcaacttcccaggtttgcagctttggcgttgtcttt

SEQ ID NO: 657 - DNA, 182 bp, Mojavia pulchra
  source 1..182: mol_type = other DNA; note = JT2-VF2
ttgagcaacgcctaacggcatcaagccacgaatcacaaatttgtctaccccgttcgtaccattcttctctattttgagcaacgcctaacggcatcaagccacgaatcacctgcaaaaaaggaatttgtgcttgttgagacccgtacttgagcaacgcctaacggcatcaagccacgaatcac

SEQ ID NO: 658 - protein, 898 aa, Nostoc sp.
  source 1..898: note = C052
MKEQFEQWVARLQISEAGQKIIEKVRSSEPSRRVGGGSKNVSGRYPSRKMGVTIQFESHRVELPIVYQLEHDEDVLEFYDQPPQIKLDYQASNGRRLGILHTPDLFVIRTNSAGWEECKTEQDLKKLAEKNPNRYFYSQEDNQWHCPPGEDYANQFGLYYRIRSDREINWVLQRNLQFLEDYYRSESLVVEEAIAKSLLAVVSSQPGITLAELLNRSTGAKSDDIYTLIIQEQIYIDLNATPLAEPKRCLIFRDEQTASAYRLMVEQPSVTLPAISPVVNIITGATVSWDGKGLNIIHVGETEVILGAENNQLIELKKAIFENLVRQGKITSLQTPEKTAISTESWQRFYQASPEDQAEALERYKTIEPYLSGHPPENETIPARTIRDWKAKYLTAIQKYGCGYIGLLSHRSVKGNRQRKLPEDTLAVMEKFILEDYETLKQKRMWEVHAALVRACEQSGVIAPSYKAFTKEVQRRTGYEQTKKRQGRRAAYQHESFYWELAITTPRHGDRPFEIGHIDHTELDVELVCSDTGRNLGRPWATFLVDAYSRRLLAVYLTFDSPSYRSCLMVLRICVKRHGKLPQIVVVDNGAEFHSVYFETLLATFECTKKQRPPAKARFGSVCERLFGTSNTQFVHNLLGNTQITRNVRQVTKSVNPKNLAVWTLGLLYEYLCAWAYEVYDTDEHPALFQSPRDAFAAGMAIGGSRVHRMISYDENFQILTLPTTSEGKAKVQVGRGVKINSIYYWSNSFRDPQIENTSVQIRYDPFNIGIAYAFVRGQWVQCISQYYAELQGRSEKELKLASIELRKRSSNHAQQSKVSAKNLAEFLASVEAQEALLEQRSYDAEVKEVFRVIEGGKATTSRNEQPKLIQVTFANTDSQADEDEAIVPETLVVYEEF

SEQ ID NO: 659 - protein, 383 aa, Nostoc sp.
  source 1..383: note = C052
MTKSTGFPLELLTRPVTERLAYFENYTVAHPRLKEVYEILMRTIAEPAGASFIFIYGPSGIGKTTLRLRVEQKLTEIALPKLESDRSRVPVVGVEAVAPESRNFNWKDYYTRALIALEEPLIDHKFDYGVRGISRDNFGKINVESKVVAPALRRALENALIHRHPDVFFVDEAQHFGKMASGYKLQDQLDCLKSVANMTGILHCLLGTYELLTFRNLSGQLSRRSVDIHFRRYCADNPEDVQAFKSVLLTFQQQMPLAEAPDLVSHWEYFYERTLGCVGILKNWLTRALKDALDRQATTVTLKDLQKRAWSVAQCQRMFKEIQEGERQLSETETDIQNLRSALGLGAKPIVLPEETPKTTRPPGKVGKRKPKRDPIGVQQDVS

SEQ ID NO: 660 - protein, 329 aa, Nostoc sp.
  source 1..329: note = C052
MTIYSEHWSLKPLEIPQRSRLFSLEPVAVGTPYAESISSYLHRLAQAHCLTSQKLVMGEIAPLILKDEDKSELLSKNLSHLLGNSDAKPAINGMREMTEKLVTVLEELTMRQDLRFLTLLSLKGMIYDKGLFRNYRAWCPCCWEEWMQENKTIYEPLSWSFKDVELCLIHKQRLIEECPHCGARLPVMARFSPAGFCSRCYGWLGQEIKDEEEIEKYRVNIQGISELIALTPQLGYKPIPIELTRKLQLILLVFEQAIGKDVKLLGYLGGIMESLRIASRTNQSQPYHLVKLIIPVCEKAKISVFQLFGSDFKELGKILFGNFSLELKL

SEQ ID NO: 661 - protein, 455 aa, Nostoc sp.
  source 1..455: note = C052
MLVSVLETYESWDLRKVAIPSRSRLYQLDPIGIGTPLVESLTGYISRLAEAHYVNPGVLMEKELATLVKKEYGGANLHRIYNYTTALNGSGVMATDLVQALEKLTLRDDLCFLTLLTWDKLFPSRNLLRSVRAWCPSCYQEWYEKEQLIYEPLLWSLDVVKICPYHHHKLIFECPHCHQKNTTLAWRSRSGYCSKCGEWLGLIPGIESANKNTLKKNELEQGIWVAKAVGELIAATPYLHEALSSTTIALTLSKWVEQIAKGNIAEFARQINIPRNTVWLWCKGKNLPSLEALTNVCYCFGVTILSFLTEETNNLSLSRKLVTTEVKTTFRAKSKAFDAERVKSYLEALLTNEQSSALSMEQVAKELKVDRRTIYKHFPHLCRAISARYASYQKDYHQKIIEECCQEVRLVAFELHKQGKYPTESAVSALVSKPGYFRHKKVRLALKEANRELEL

SEQ ID NO: 662 - protein, 220 aa, Nostoc sp.
  source 1..220: note = C052
MAAILIQSEEYVDLTFKLRGAPIPLDNGYVIYSALSSICPSLHELKSIGIHPITGIPTRNNLLELTAQSRLKVRIYHQQIPLIYPYLAGQAFHIGQNFYQLDIPDYKPLVSSESVYSRLVIIKGFQDSTNFIEAVQRQLDNLGIQGKIELLTRQDGTPQRRQLTINKEGKQFKVRGFGVKISELNPEDSLTLQEQGIGGKRKMMCGIFVPATRSKGEEET

SEQ ID NO: 663 - protein, 525 aa, Nostoc sp.
  source 1..525: note = C052
MVSTQPKISLSLHAADTTIMHRVGMTGLYMTLKRLEKQYPLPRQRGGHISWFLTADTIELFWEGSDFIALSWLINESFQLDDTGLIHLVGLDNDRIDLRQKIHIHEGICAVFLRLNKFYQAGEIINTELTFEEKQVEYQYKSLTWYAHQTFAEKLCEADTQQLRHDYIEITSWLYLGGIVRHARTQNTTKLEEKPEYALALLFVPVVCHYCLLHIPSEDLKERKPHRYLVVIPEIKDFEDASQRRWRLQQFETKQLHVSTLGEAGLLYYSLDDIQPEVGYYQACQVWLYEKTNKASRQPTLMSIEEIKIDKNILITYQQVQKYFKTNYQIIKYKQIFIKVNPIRSLIADNLVKGIHWWSNLWEKLVIEDSKEYLFNQLFSNREGLIIMAENSEEDKQYLIFIKVFQQAMKGNFAKIYAKTEEGKDPPIKKKVERLRAELNYCYDELSFKEYLSDFLVRGGLNKYFNEHQEEIALLIKKSPWQEIRIWSLLAIASYKPKDKPTNMDDSLFPNNQKVEEVNYESEEE

SEQ ID NO: 664 - protein, 323 aa, Nostoc sp.
  source 1..323: note = C052
MMSQKKNENNIPNYYLYGTVLTRYGLASLNHDIRRGNKTILQKGYWNNGKIHSFVGSSAIRWALRFYLQKQGYLVNRVWDEDEHINRLTSEDFDPEQFYDDDIFGFALLESAETEEETSTTKRKKKQTKVSTLNQRMGALGMNMAVSLTPYDGAVKLGAKSGREKDSTSLHFTEYHATRYQYYFGIDVTHLKDFSRILPLIDGIMNLPKVGGSSNIFNYPFCPDSLVFQWTNHFASYISYCFEYCDPKSKEAKLSQEFIDEVECGQIDPSKLWIGGTIVKELQQLDNFESSPLKKAHIYRNRNEMIEVLKTVIKRDLGLEESK

SEQ ID NO: 665 - protein, 212 aa, Nostoc sp.
  source 1..212: note = C052
MIAPLILYLDVPFATFRDSHAREMGKTYPVPPPATVYGMLLSLVGETNIYRHCGVELAIAMLSSPKKSQILRQMRRFKNADFSHPENVIPCYQEILSNLKCLIWVRSDEEKIQPSLRERIQLAFDHPELVRRFGCLFLGESDQLIKTIKLVSEDYLEGVRQWAIIDNRGRLTLPYWVDHVGSRNTRFLRYRIEEIDRLSPPDLAWTMVQSPI

SEQ ID NO: 666 - DNA, 209 bp, Nostoc sp.
  source 1..209: mol_type = other DNA; note = C052
gcgcacctcaatggcattgagggggtcagcggttcgaatccgcttagctccattcttcacaccctaactctctaagttaattgtgtgactttacccataactttgccgcaacggcaagcttatgcttccaatagagggcggcaaagttatggttccaatttctggataatttttaaacttcataactcaagttcacgattcgcttcttt

SEQ ID NO: 667 - DNA, 296 bp, Nostoc sp.
  source 1..296: mol_type = other DNA; note = C052
tggatggccgaaagtttctatcccataccagcataaaccgcttctgttccattcattctaaaaaaatccggcgctttcctgctttctgtgcttgattggactcacggcaagcttatccttccaatttggactggcggcaaagttatggttccaaactgtcaatttcatccaaaattagctgacgcaagaatgagggttgtagtgttgttgacggcaaagttatggttccagtaacggcaaagttatgggtaaagtcacaaattgagagagttagggagtttttttagatggtttta

SEQ ID NO: 668 - DNA, 323 bp, Nostoc sp.
  source 1..323: mol_type = other DNA; note = C052
ttgagcaacgcctaacggcgtaaagccacgactcacgagatagccaatcttcacgggcttcagcatccccttgagcaacgcctaacggcataaagccacgactcactatcgtccaaaggataatgtctctatccgtctttgggaattgagcaacgcctaacggcataaagccacgactcacgatcgccagctaaagaaatgtttgcaacaaggaattgagcaacgcctaacggcataaagccacgactcaccataaagtcaaaattcggtttgttctcccgaatcgtttgagcaacgcctaacggcataaagccacgactcag

SEQ ID NO: 669 - protein, 898 aa, Nostoc desertorum
  source 1..898: note = CM1-VF14
MKEQFEQWVARLQISEAGQKIIEKVRSSEPSRRVGGGSKNVSGRYPSRKMGVTIQFESHRVELPIVYQLEHDEDVLEFYDQPPQIKLDYQASNGRRLGVLHTPDFFVIRTNSAGWEECKTEQDLKKLAEKNPNRYFYSEEDTQWHCPPGELYANQFGLYYRIHSDREINWVLQRNLQFLEDYCRAKFLAVEEAIAQSLLAIVSSQPGITLAELLNRSTGVKSDDIYTLITQEQIYIDLNASPLAEPERCLIFRDEQTASAYRLMVEQPSVSLPAISPVVNIVTGTLVNWDGKGLNIIHVGETEVILGAENNQLIELKKAIFENLVRQGKITSLQTPEKTAISTESWQRFYQASPEDQAEALERYRTIEPYLNGHPPENETIPARTIRDWKAKYLTAIQKYGCGYIGLLSHRSVKGNRQRKLPEDTLAIMEKFILEDYETLKQKRMWEVHAALVRACEESGVIAPSYKAFTKEVQRRTGYEQTKKRQGRRAAYQHESFYWELAITTPRHGDRPFEIGHIDHTELDVELVCSDTGRNLGRPWATFLVDAYSRRLLAVYLTFDSPSYRSCLMVLRICVKRHGRLPQIVVVDNGAEFHSVYFETLLATFECTKKQRPPAKARFGSVCERLFGTSNTQFVHNLLGNTQITRNVRQVTKSVNPKNLAVWTLGLLYEYLCAWAYEVYDTDEHPALFQSPRDAFAAGMAIGGSRVHRMISYDENFQILTLPTTSEGKAKVQVGRGVKINSIYYWSNSFRDPQIENTSVQIRYDPFNIGIAYAFVRGQWVQCISQYYAELQGRSEKELKLASIELRKRSSNHAQQSKVSAKNLAEFLASVEAQEALLEQRSYDAEVKEVFRVIEGGKATTSRNEEPKLIQVTFANTDFQADEDEAIVPETLVVYEEF

SEQ ID NO: 670 - protein, 383 aa, Nostoc desertorum
  source 1..383: note = CM1-VF14
MTKSTGFPLELLTRTATERLAYFENYTVAHPRLKEVYEILMRTIAEPAGASFIFVYGASGVGKTTLRLRVEQKLTELALPKLESDRSRVPVVGVEAVAPESRNFNWKDYYTRALIALEEPLIDHKFDYGVRGISRDNFGKINFESKVVAPALRRALENALIHRHPDVFFVDEAQHFGKMASGYKLQDQLDCLKSVANMTGILHCLLGTYELLTFRNLSGQLSRRSVDIHFRRYCADNSEDVQAFKSVLLTFQQQMPLSEYPDLVTHWEYFYERTLGCVGILKNWLTRALKDALDRDATTVTLKDLQKRAWSVAQCQRMFKEIQEGERQLSETETDVQNLRSALGLGAKTIAQPEEAPKNTRPPGKVGKRNPKRDPIGVQQDVS

SEQ ID NO: 671 - protein, 329 aa, Nostoc desertorum
  source 1..329: note = CM1-VF14
MTIYSEHWSLKPLEIPQRSRLFSLEPVALGTPYTESLSSYLHRLAQAHCLTSQKLVMGEIAPLILKDEDKSELLSKNLSHLLGNSDAKSAINGMREMTEKLVTVLEELTMRQDLRFLTLLSWKGMIYDKGLFRNYRAWCPCCWEEWMQDNKTIYEPLSWSFKDVELCLIHKQRLIEECPHCGARLPVMARFSPAGFCSRCYGWLGQEIKGEEEIEKYRVNIQGISELIALTPQLGYKPIPIELTRKLQLILLVFEQAIEKDVKLLGYLGGIMESLRIASTTNQSQPYHLVKLIIPVCDKAKISVSQLFGSDFKELGKILFGNFSLELKL

SEQ ID NO: 672 - protein, 465 aa, Nostoc desertorum
  source 1..465: note = CM1-VF14
MLANRLVTYECWDLKKLSIPSRSRLYQLEPVGIRTPMVESLTGYIERLAEAHCVTPDVLISRTITPLLKQIFLKSRSSRDLRSLFDRATAINGTGNIVIDLVQALQKLTLIEDLHLLTLLFWSEIIPTRNLFRTKSAWCTVCYEEWRLAKQVIYKPLLWTINSVKVCPLHKIYLCLQCPHCQQELPLLSWRSRPGYCSKCGDWLGMNLPVKSSSELTDSSTLSKEELHSQTWIVEVIGELISFTLSFNSPPAKEEIAKSLSLIINAVTNGNIAEFARLMGIPKNTLWMWQTGKALPMLDILLKICYRLEISLLDLLKPEQLAAKSFTKISHKTIRRSPTLRASPKLFDANQVQDTLLAILASDNQPPLTMEEVATGLGYNKRTIFSHFPDLCRAISAKYRSYGKACHTEKIQQSCREVKQIVLKLHNQGEYPSEARVSEIMTHPGYLRYKQVRAALNETRREIGV

SEQ ID NO: 673 - protein, 220 aa, Nostoc desertorum
  source 1..220: note = CM1-VF14
MAVILIQSEEYIDLTFKLRGAPIPLDNGYVIYSALSRICPILHELESIGIHPIAGIPTRNNLLELTAQSRLKIRIHHQQIPLIYPYLAGQAFHIGQNYYQLDIPEYKPLISSESVYSRLVIITSFQEPINFIEAVQRKLDNKGIEGKIELLTRQDGTPQKRQLTINQKGKQFKVRGFGVKISELNPEDSLTLQEQGISGKRKMMCGIFVPATRSKEEEEI

SEQ ID NO: 674 - protein, 525 aa, Nostoc desertorum
  source 1..525: note = CM1-VF14
MVSTQPKISLSLDAADTTIMHCVGMTGLYMTLKRLEKQYPLSRQRGGHISWSLTADTIELFWEGSDFVALSWLINESFKLDDTGLIHLAGLDNNAIDLSQKVHIHKGMCAVFLRHNQFYQAGELVNTELEVEEKKVEYQYKSLTWYAHQTFAEKLCEADTQQLRHDYVQITSWLYLGGIVRHARTQNTTKLEEKPEYALALLFVPVVCHYCLLHIPSEDLKERKPHRYLVVIPEIKDFEDASQRRWRLQQLETKQFHVSSLGEAGLLYYSLDDIQPQVGYYQACQVWLYEKTNKASRQRTLMSIEEIKIDKNILITYQQVQKYFKTNYQIIKYKQIFIKVNLIRSLIADNLVKGIHWWSNFWEKLVIEDSKEYLFNQLFSNREGFIIMAENSEEDKQYLIFIKVFQQAMKGNFAKMYAKAESGKYPPIKKKIERLRAELNYCYDELSFQEYLSDFLVRGGLNKYFNEHQEEISLLIKKTHWQELRIWSLLAIASYKPKDKPTNMDDSSFPNNQKVEEVNYESEEE

SEQ ID NO: 675 - protein, 319 aa, Nostoc desertorum
  source 1..319: note = CM1-VF14
MMSQKKSDNNIPNYYLYGTVLTRYGLASLNHDIRRGNKTILQKGYWNGKIHSFVGSSAIRWALRFYLQKQGYLVNRVWDEDENINRLTSEDFDPEQFYDDDIFGFALLESAETEEETSPPKRKNKQTKASTPNQRMGALGMNMAVSLTPYDGAVKLGAKSGREKDSTSLHFTEYHATRYQYYFGIDATHLKDFSRILPLIDGIMNLTKVGGSSNIFNYPFCPDSLVFQWTNHFAPYISYCFEYCDPKSKEAKLTKEFIDEVECGQIDPSKLWIGGTIVKELQQLDNFDNSPFKKAHLYRNRHELIEALKTAIKRDLGLD

SEQ ID NO: 676 - protein, 212 aa, Nostoc desertorum
  source 1..212: note = CM1-VF14
MIAPLILYLDVPFTTFRESHAREMGKTYPVPPPATVYGMLLSLVGETNVYRHCGVELAIAMLSSPKKSRILRQMRRFKNADFSHPENVIPCYQEILSNLKCLIWVRSDEERIQPSLKERIQLAFDHPELVRRFGCLFLGESDQLIKTIKLVSEDYLEGVRQWAIRDNRGRLTLPYWVDHVGSRNTRFLRYRIEEMPSSPPPYLAWTMIQSPI

SEQ ID NO: 677 - DNA, 295 bp, Nostoc desertorum
  source 1..295: mol_type = other DNA; note = CM1-VF14
cactggttcgaatccagttacgtccattttttgttgtacagtgactaattatttgtgtgactttacccataactttgccgcaacggcaagcttatggttccaatagggggcggcaaagttatgcttccaattttccaggtgtagagaaagaagccaacttactctgcccttttaagtttaatagctttacactccaatttcacgtcgtgtttcatttaaagcagcacgaacctgtttgtaacggagatatccaggatgagtcattatttcagacacacgagcttctgaggggtat

SEQ ID NO: 678 - DNA, 541 bp, Nostoc desertorum
  source 1..541: mol_type = other DNA; note = CM1-VF14
gggctacgcctacgcattctaaatacaaagctgaatcaacagcttgagtttgcgcggaatgcgatcgccattgagtcttatagtaaatagttccaaacctttacaaggctaaagtttgaggaattgtacaacttttttatttatcaatatgacgaattttgagaaaattgtacgacttttttatacttatacacttttctgatttctatgcttgattggacttacggcaagcttatccttccaatttggactaacggcaaacttatggttccaaactgtcagtttcatccaaaattaggtgacgcgagaatgagggttatagtgttgttgacggcaaagttatggttccagtagcggcaaagttatgggtaaagtcacatgtttaacaacagtcaaactaacccaaatttacacagcacagaggcttgtataagcatgaactgcggcgctgttgaatttccttattttattgtcaaggttcgatgttttgtcaatcagtttattttgcgggaatggtaagctgcgatcgctaattctttcg

SEQ ID NO: 679 - DNA, 609 bp, Nostoc desertorum
  source 1..609: mol_type = other DNA; note = CM1-VF14
gaaggaataacccaaccttatcaagccacgaatcacttttgcgatcgcagtcagtaatttgacctcgatatttgagcaacgcctaacggcataaagccacgaatcaaatccctgtacaattggaaatccttcaagataaatccttgagcaacgcctaacggcataaagccacgaatcacagcaacagcattaggtctttcagggagaggttgaattgagcaacgcctaacggcataaaggcacgaatcacgatcgtaattccatctttatttgttattggttctggttgagcaacgcctaacggcataaagccacgaatcacgataaattcactaacaagtaaaaatgaagccttccttgagcaacgcctaacggcataaagccacgaatcacgtgtaacctgcttccagttgttaatcgcctcctcaattgagcaacgcctaacggcataaagccacgaatcactactgtgccaattccccaaggtacgccgagagatacttgagcaacgcctaacggcataaagccacgaatcacgttccaccacaaagcttacaaagtaccgccctgctgttgagcaacgcctaacggcataaagccacgaatcac

SEQ ID NO: 680 - protein, 918 aa, Coleofasciculus sp.
  source 1..918: note = FACHB-SPT36
MLSDGEFQAWCDRLQLSQQQRDWVNQIRTSPPVRKVKGSSRNVHGPYASKKMGRTIQFESHTVELPALIQFYENDDSVLEYWDQPIKFTIKCSPQGKQATTISHYPDFFVMRKNQCGFEEWKTEKKLSKLSKEQAYRYQNLEGKWVDIIVQEYVENLGYYYSLRSDSQIDWVKYRNQKYLQPYKQGYLHQQYILDEQVEFHIKEIIINNPGINLTNLLKKAENATIDDINTLIALEKVYVDLSAIALVEQERVHLFRDQATAEAYITATHDYSEPVSNSVQIVDLKVGSSFLLDRKSLTIDHIGESKIILRGEQGIIRWTHAEFQQLVELGEITCLQTKEQKTLDEEGWQQYFREASPKALEIANQRYQAIKPLLDGESYDSLDCNVPERTLRQWKAKYRKAKQEYGVGLVGLIPQYKGNPTPRYSDEDLEFIDKVIEEHYETFKQKNAWQTYLMLRDKWEESGLNSPIPSHTFYYERLKKRNSYQQTKRRMGSRAANSLLGPWLIKPTTPRHGDRPLEIVHIDHTQLDVQCICPYSKKNLGRPWVTGMIDAYSRRILALYLTFDHPSYRSCMMAIRICVQRFGRFPEWIVVDNGKEFQSTYFETLLARFEASKKHRPKDVPKFSSIIERWFGSQNTEFINNLRGNTQIMKHVRLVKKENNPKNLAIWNLEELYDYLAFGYAYGVYDRAEHPALEGMSPQQAFELGLAKTGHRPHQYIKYDEQFKILTLPTNNKGTAKVIPGKGIRINYQDYWSNEFYSVENQSVPVRYDPLDYGVAYAYVNNHWVKCLSNYYMKFQGYSEKAVEIASTVCRRKQQKYNQSQYIGFKEIVDLLNNAEDHEEIMLQIRQDRSAKLVYNLIEGTLSSAVLNSVDIKQPSEPKTKEIEEAIFDREEAVLQPSLSREINLDNIQPFADEELW

SEQ ID NO: 681 - protein, 371 aa, Coleofasciculus sp.; identical to SEQ ID NO: 637
  source 1..371: note = FACHB-SPT36

SEQ ID NO: 682 - protein, 303 aa, Coleofasciculus sp.
  source 1..303: note = FACHB-SPT36
MAVGTPYTESLSSYLNRLAQEHCLTSQKLIMGEIAPLILKDEDKSELLAKNLSHLLGNSDAKPAINGMREMTGKLVAVLEELTMRQNLRFLTLLSCKGMIYDRGLFRNYRAWCPCCWEEWKQENTTIYEPLLWSFKDVEVCLIHKLRLREECPHCGSRLPVMARLSPAGFCSRCYEWLGQEIKGEEEIEKYRANIQGISELIALTPQLGYKPIPIELTRKLQLILLVFEQGIGKDLKLLGDLQGIMESLRIASTRNQSQPYHLVKSIIPVCKKAKINIAQLFFSNYKELGEILFRNFNLEFRL

SEQ ID NO: 683 - protein, 458 aa, Coleofasciculus sp.; identical to SEQ ID NO: 639
  source 1..458: note = FACHB-SPT36

SEQ ID NO: 684 - protein, 220 aa, Coleofasciculus sp.; identical to SEQ ID NO: 640
  source 1..220: note = FACHB-SPT36

SEQ ID NO: 685 - protein, 525 aa, Coleofasciculus sp.; identical to SEQ ID NO: 641
  source 1..525: note = FACHB-SPT36

SEQ ID NO: 686 - protein, 318 aa, Coleofasciculus sp.; identical to SEQ ID NO: 642
  source 1..318: note = FACHB-SPT36

SEQ ID NO: 687 - protein, 212 aa, Coleofasciculus sp.; identical to SEQ ID NO: 643
  source 1..212: note = FACHB-SPT36

SEQ ID NO: 688 - DNA, 468 bp, Coleofasciculus sp.
  source 1..468: mol_type = other DNA; note = FACHB-SPT36
ccacaagaaaaagcgcgggatttagcgatcgctgcctatcgatgtcgtattactgcggcgctataagcagatactagatactgaaccttgacaatataatacataaataacagcgccgcagttcatgcttttaacagccgctgtgtcatttaaagtttgattttgccgtaatttaaagccaggttttgccgccccattctctcaaagcctcataaacccgttgtatgaatattctagcaagatagccttttaaagcctgattttgccgaaatagtatttttaaagtttgatattgccgaaatagacggggcttgttacgatatttttatcgtcaacttgaagcgattttagggaggatagccatgctctccgatggtgaatttcaagcatggtgcgatcgcctgcaactctcacaacaacaaagagattgggttaaccagattcgcacatctcctcccgtccgtaagg

SEQ ID NO: 689 - DNA, 369 bp, Coleofasciculus sp.
  source 1..369: mol_type = other DNA; note = FACHB-SPT36
cagcgatcaggagaatacccaagcgagtcccgcgtgtgtgaactgattagtaaccccggctattttcgttatcagcaggttcggctactctataagcaagagcttcaatctactctaagtagcttgtgagctttcagtgtgaatgaggatagtcgatcgtctacatctattttctcgtcatttttttcaggcatagttttgccgctatggttttcaggcataactttgccggagcggcaaaatcaaactttaaatgacaaagccacctatagcggcaccaaaaaaaataatggacacaactggattcgaaccagtgacccccacgatgtcaacgtggtgctctaaccaactgagctatgcgtccgtccg

SEQ ID NO: 690 - DNA, 255 bp, Coleofasciculus sp.; identical to SEQ ID NO: 646
  source 1..255: mol_type = other DNA; note = FACHB-SPT36

SEQ ID NO: 691 - protein, 926 aa, unidentified
  source 1..926: note = Cyanobacteria bacterium FACHB-472
MLTEDEFKNWCRRLNLSELARKTIEVIRSSEPSRLVGGGRKNVSGRYPSRKMRRTIQFESHRNELAHIYKLERDEDVLEYYDQPPSIELNYLSKSARRNRHLHTPDFFVIRKNTAGWEECKTEEELLKKAQESPNRYQLTEHGKWQCPPGEEYAHPLGLYYCFRSSAEINWTFQRNFVWLEDYFRAKLPQVDEEVSRAVLSIVEAEPGIAFADLLNRVEQAKVDDLNILIATERVYVDLSAVSLKQPEQVQVFLDQEEAFTYAQVTKIAPPEPGSQVCAVKISAGTAISWDGVNWQIVNTGNTSIGLLKDNGEFTQLTNKVFDSLVEKGQITGLLAQTESSLNAEVEEILRKASKRDREEANRRYKAIEPFLIGNSSTTPNRSERRWIAGYREAEKIYQRGFLGLLPNHQQKGNYQPKIGEEVRILMEAFIEDKYETLKQQSIIRVYSSFKEECIQQGIKHPSYELFRKTVHERPGYQQTLKRKGHRAAYTEETFYWRLDRKNTPPHGERPFEICHIDHTQADVELVSSIMAAIGGNLEFVSDNGNQERPWLTLLMDAYSRRILAAYLNFDPPSYRSCMMVLRICVERFGRLPQMVVVDNGAEFNSSNFETLLACYRCTKKQRPPAKARFGSVIERFFGVANQEFWHNLKGNTQIMRNVRQVTKGVNPKNQAIWTLGKVYEYFCEYVYEVYETSPHPALRQSPRDAFNTGIATGGSRDHLLISPDEFRLLALPSPTDGGGKRKVTREGVKINYLYYWHKSFSGIKVRDTDVEVKYDPFDITVAYAYVNKEWVKCSSGYIKELQGHSVRELMIATTELKKLNEIQNRQFSKISGKKLAQFFASMEKEEVALSPPRREAKKAVLTQRRRDLEVKQVHALIEGDSVEQEPDSSLNLLQESLSNESESLALPTESIPLDDDDVETFLEEW

SEQ ID NO: 692 - protein, 396 aa, unidentified
MATEQGFPPELLTQSAQKRLDYFKAPDKTVMHGNLKLAYNQVLRAIREPAGASIILVMGPSGVGKTTLLRLVEKKIIEESLLQMELDPGWIPIVCVEAVAPGKDTFRWKDFYKRTLIAIDEPLIKEKISYSEDGIRRDSEGKLIVKSRATEDSLRLAMEQALSHRRPYTLAVDEFQDIGKMASPKVLEAHMDCIKSAVNTTKIPWTGFGTYQLKDFLELSPQISRRNRIIHLPRYRLEDDLDIKEFKRVLKHLLCRMPLPETPPLVEKYWEYCYERSIGCIGTLKGWLVQALDLALEKGATTLTLSHLEQTAKSASECIQMAKDAIEGEEKLTDTKDSQRQLRDLLNSKKQKVQEDQTNSGGDGKPQKDGGKSQSQRSGRVGQRNPTRDPLASESL

SEQ ID NO: 693 - protein, 336 aa, unidentified
MSVDECTSLEMWDLQKPAIPARSRLYHLEPIGVGTLYTESLSSYLCRLAQEHCVTFQKLVMGEIAPQMMEQDYEVALIKKNISTLFSNSDAKPAINGMREKTQSLVQALKELTQRRDLKFLSILTWKGVINERELFRQYRAWCPQCNEQWRREKKVIYEPLLWSFREVNICLHHNCILVDKCPHCGSRLPVIANSLKLGFCSRCKDWLGSQQDESEVLTDDELEWTQYKIKSIGKLIAVTPKLGYQPSLEALTRKLQLISFCFERVVNQDLTQFIRLGKIMEQLKIALTQHYDKPFHLIDIVIPVCSQAKISISQLFLEDFNSLSTVLFGNLKINW

SEQ ID NO: 694 - protein, 459 aa, unidentified
  source 1..459: note = Cyanobacteria bacterium FACHB-472
MLIQPYATEELWSIEKPELPKRSRLYHLPPVGIGSPFVESLTSYIARLAESHSVLPSVLISKEITPYLKKVFAKRLSSRRLRALFDRARALNGTGDIAMDFVQALETLTLRSDLCFLTLQSCASILAQRGLFRPYKAWCPTCYQEWLTSGQIAYDPLLWIIEVVKVCSHHHCPLCFHCPHCHKQLPILEWRSRLGYCSICSKWLGSPCDSFTRGTSSPDELTSQIWAANTIGELITAVAGFSSPLPRQNVAAAMRIVVDLVTDGNIAAFASRLGIPKNTLWMWHTGKALPQLDVLLKICYSLEISLLDFLIPEKLAAKPLKISLHKSPQRAHNKRVSPKPFDSDKVEEALQATLASDEKPPLTMKEVAERLEYNRRTISQHFPDLCRAISAKSLRYRKAAQEKKIEQSCEQVRQIALKLHIENVYPSEGRVSQLMTKPGDLRNKKVRATLQELQSELSR

SEQ ID NO: 695 - protein, 216 aa, unidentified
  source 1..216: note = Cyanobacteria bacterium FACHB-472
MLAEDAPYIDLVFSLKGGTLPLDNGYIVYSALSRICPAIHQLENLSIHPIAGIPESSKQLRLTQRSKMQIRLPVELIPFIYESLAGQTFSIGQNQFELGIPEYNPLHPFPDLYSRLVIIKRFQEPQRFLEAAKRQLERLNIQGTITLSTRANGQPQCRQLTIENKSGAFAVRGFGIKVTDLSTEDSITLQKFGMGGKQKMMCGVFVPSRRNKKERE

SEQ ID NO: 696 - protein, 504 aa, unidentified
  source 1..504: note = Cyanobacteria bacterium FACHB-472
MTTTTRPKIYLSLRASDTTIMHRAGMAGLWMTLQQLELHFPAPATRPGNLSWLLTNCSISLDWQGEDFTVLDWLLRQSFQINEKGLMSLTGLDSSSMELINQIHLHQAIGATFLRHNQFYKSGEQTSESLSIDGITGTLKYKKIEWYAHQTFAEKLCDETGQLLGDYLQIVSWIYPGATVRHAILDKYNKLEEKVEYALGLLFLPIVCQYFILYSNSSKVETKQPTKYIVVIPEVTNLRTATQRCWELRRLEYKDLPVTSLGEAALKYYSYDKIDTSNEYHEVCQALLYEKLNKDSKQRSLTDIKDIEIEAKAILDYKLVDKHFQKNRIFRDGFNWIVELNLIRGIIADNLVTGVPWWADFWVTFNQDSLDDLFKQLFDNKEGLLRMIEADEKMEIYKSFIRACHEALRKTYGKIYGRTKEGDVPRFEREYERIRGELGRCYDQQSFNDFLSDFLSRAGLNSALYDQWESILPLLMGQVSWEKARNLVLIALASYKPSPKPSEE

SEQ ID NO: 697 - protein, 309 aa, unidentified
  source 1..309: note = Cyanobacteria bacterium FACHB-472
MYHLFGNLLTHYGSASLNHGQSKGNVSTLQKVPWHDKLHSTVSGDAIRWALRYYWQKQGYPVNRVWDADTFTHQLIDVNFDPVRFIDDDVLGYMGTEAAKVEIIEEESEPLEQPDKKKKIKKAKGKSIPRLGALGVNRAISLTPYNGTMTFNAKSGEKDRTSLHHNEYHNTRYQYGFALDPNHLKDKSRIFAVLDGLMSIRKVGGKNNVFCYDFSPESMVLRWTEKNSPHLFYCFEQHSLELEPIISSDLVEQVEVEDINGSELWIGGKIAKNLHLKDAHIFPGREQAATDLKKVIARDLKLTEFQPSS

SEQ ID NO: 698 - protein, 215 aa, unidentified
  source 1..215: note = Cyanobacteria bacterium FACHB-472
MSSIALYVEVPFATFRQSHGREYGKTYPVPPPSTLYGMLLSLVGETDAYKHCGVQLAIAMLSQPRKSKVLRQLRRFKVKDYSDSRNTIPEYQEILTDVKFVVWVASGTERVQPTLSQRVEQALMYPSSVQRFGCLYLGESNDLVNVVKLVSDDYRSQSRRWLIRDDEGLMTLPYWVDHVGSKGTRWLRYRLQEIATESPPDSSWTTIQAPVCKHR

SEQ ID NO: 699 - DNA, 542 bp, unidentified
  source 1..542: mol_type = other DNA; note = Cyanobacteria bacterium FACHB-472
gagtaaagccagtcagaataggctaaatagtgccgactagcacttagtagttcaatatcagaggtgtcagtaccttatgtaatttaaagtttgattttgccgctccggcaaaatcaaactttaaattacatatttgtgactacaaccataagttgtccaatattacaaccataagttgtccagagaaatcgctgtaataagcattctttcgtctagcagatcgtatcccgaactccatttaacaagcataagttgaccaagagtagaaatactaggcataagttggcacagagtcgcaagcctatcccctacaaaaaccataggtaattagccaagactcacctcagtccgagcagcgacttaggcgctactttgctaattttcaactgagcataactatcttcatttgtaatgacctctttatattgcttaacaaaaagcatttttagtagaaaaaacttattttaagttatggaagtttttgcctatattcaaggaatcattcaacctattaattgaccacctgtatagcacttataaaa

SEQ ID NO: 700 - DNA, 197 bp, unidentified
  source 1..197: mol_type = other DNA
agtagcccaatcaagttctaaaactactgcccgaacgctcaacaagctacaagcataagttgaccaggggaaattacaagcataaagtgaccattgtggacaacttatggttgtagtcacaatattatagggttagggttgacagtctccgtaatggacacaactggattcgaaccagtgacccccacgatgtcaac

SEQ ID NO: 701 - DNA, 252 bp, unidentified
  source 1..252: mol_type = other DNA; note = Cyanobacteria bacterium FACHB-472
ctgagcaacgcctatagacataaagccacgaatcacaaacgacgacgtgattgaggtaggccaaaatcatcactgagcaacgcctacagacataaagccacgaatcacccattacctcaagaagtattctcaaaaacatcccccctgagcaacgcctatagacataaagccacgaatcacagctctgctagttctgaatctagtcttgatagtttctgagcaacgcctatagacataaagccacgaatcaca

SEQ ID NO: 702 - protein, 931 aa, Microcoleus sp.
  source 1..931: note = FACHB-53
MLTEDEFKNWCRRLNMTELARKSIEIIRSSEPSRLVGGGRKNVSGRYPSRKMRRTIQFESHRNELAHIYKLEHDQDVLEYYDQPPPIELIYLSKSGRRIRQLHTPDFFVIRKNTAGWEECKTQEELLKKAQESPNRYQLTEPGKWQCPPGEEYAHALGLYYCFRSSAEIDWIFQRNFVWLEDYFQAKLPQVDEEVSRAVLSVVEAEPGIVLTDLLNRVEQAKVDDLNILIATDRVYVDLSAVPLRQPEQVQVFLDQEEAFTYAQVTKIAPPTSVSQICAVKVSAGTPISWDGANWQIVNTGNTSIGLLKDNDDFIQLPNKVFEDLVEKGQITGLLAQTESSLNAEVEEILRKASKRDREEANRRYKTIEPFLNRNSSTKPNSSERRWIASYREAEKIYQRGFIGLLPNHQQKGNYQPKISEEVRTLMEAFIEDKYETLKQQSISRIYWSFKEECIQQGIKHPSYELFRKTVHGRPAYQKTLKRQGHRAAYQEELFYWRLDREKTPPHGERPFEICHIDHTEADVELVSSIMATLGGDLEFLCDGNGNKARPWLTLLMDAYSRRILAAYLTFDPPSYRSCMMVLRICVQRFGRLPQIIVVDNGAEFNSSDFETLLAYYRCTKKQRPSAKGRFGSVIERFFGVANQEFWHNLKGNTQIMRNVRQVTKGVNPKNQAVWTLGKVYEYLCEYVYEVYEASPHPALRQSPRDAFKAGLARGGSRDHLLISPDEFRLLSLPSPTDREGKRKVTRQGVKINHLYYWHKSFSGIKVRDTDVEVKYEPFDITVAYAYVNKEWVKCSSGYLQELQGHSVRELMIATAELKKLNEIQNRQFTEITGKKLAQFFASVEKEEVALSPPSREAKKAVLAQRKRDLEVKPVHALIDGDYVEQDTDSSVDHLEESKSYESESLPLSTESIPLDDEDDDFENFQPLEEW

SEQ ID NO: 703 - protein, 396 aa, Microcoleus sp.
  source 1..396: note = FACHB-53
MATKQGFPPELLTQSTQKRLDYFKAPGKTVRHRNLELVYNQVLRAIREPAGASIILVMGPSGVGKTTLLRLVEKNILEESLPQMELDPGWIPIVCVEAVAPGKDTFRWKDFYKRTLIAIDEPLIQEKISYTEDGIRRDSEGKLIVKSRATEDSLRLAMEQALSHRRPYTLAVDEFQDIGKMASQKVLEAHMDSIKSAVNTTKIPWTGFGTYQLLDFLELSPQLSRRTRIIHLPRYRLEDEKDIEAFKEALKHLLYRMPLPETPRLVNKYWEYCYERSIGCIGTLKDWLVQALDLALEEKATTLTLNHLEKTAKLTSECIQMAKDAIEGEERLTDSKESQRQLRELLNPKKQKVQEAQTNSGKDDKQENNGSKSKGSSRRRVGQRNPKRDPVASESL

SEQ ID NO: 704 - protein, 339 aa, Microcoleus sp.
  source 1..339: note = FACHB-53
MSVDESTSVEMWDLQKPAIPPRSRLYHLEPIGVGTPYTESLSSYLCRLAQEHCVTSGKLIVGEIAPQMMGEGYKVTFIKKNVSTIFSNSDAKPAINGMREKTQSLIQALKELTQRKDLVFLSLLTWKGVINERELFRQYRAWCPQCNEQWRQEKKVIYEPLLWSFRQVDACLNHNCLLVNECPYCSSRLPVIANSLQLGFCSRCKRWLGSQKDESQVLTADELAWNQYKIKSIGDLIAVAPKLEYQPTLDALNKKFQLILFCFERAVNQDLTQFISLGKIMEQLKIALTQHYDKPFHLSNLVIPVCYQTDISITQLFLEEFNLLSEILLRNFKINYRLT

SEQ ID NO: 705 - protein, 458 aa, Microcoleus sp.
  source 1..458: note = FACHB-53
MIVDPHPEELWSIEKPQLPKRSRLYHLAPVGVGTPFVESLTSYIARLAESHSVFPSVLISKEITPYLKKVFAKRLSSRRLRALFDRARAVNGTGDIAMDFVQALETLTLRNDLCFLTLLNCASILPPRGLFRAYKAWCPACYQKWRLSRQVVYEPLLWAIETVRVCPQHHESLCLYCPHCHKQPPLLEWHSRSGYCSICGKWLGSVCDSFACSNLSPEDLKKEIWVAGSIGELITAVHSLSSTLSRENVAKGMCAAINLVTQGNIAAFASRLGIPKNTVWMWHTGKALPQLDVLLKICYCLEISLLDFLRPEKVAAKPLKISLQTSPEQSHNKRVSPRSFDSDKVEEALQATLASDEKPPLTMKEVAERLEYDRRTIYRHFPDLCRAISAKSRCYRKTAHQKNIEQSCEELRQIAVKLHKENVYPSEGRVSELMTKPGDLRNKQLRVTLQELQSELSR

SEQ ID NO: 706 - protein, 216 aa, Microcoleus sp.
  source 1..216: note = FACHB-53
MLTEDYPYLDLVFSLTGQSLPLDNGYIVYSALSRICPAIHQLDNISIHPIAGIPESSKELRLTQRSKLQIRLPVDLIPFIYEYLAGQTFSIGQNQFQLGIPEYNPLHPFPDLYSRLVIIKRFQEPQRFLEAAKRQLERLGIQGTINLSTRSNGQPQCRQLIIENKAGIFPVRGFGVQVTGLSAEDSITLQKYGMGGKQKMMCGVFVPSRCNQRERE

SEQ ID NO: 707 - protein, 517 aa, Microcoleus sp.
  source 1..517: note = FACHB-53
MTTTTQPKIHLTLKGSDTTIMHRAGMAGLWMTLKQLERQFPTPANRPGNLSWLLTNSSISLDWQGPDFQVLDWLLRQSFQINEKGLISLTGLDSSSMELMNQIHLHQAIGATFLRHNQFYKSGERTSESLSVDGIKERLIYKKIEWYVHQTFANQLCDTTGQLLKDYIQIVSWIYPGATVRHAILEKYNKLEEKVEYALALLFLPLVCQYFIWHSNSSRFDTKQAAQYIFVIPEVTNLPIAAQRCWELRRLDYKDFHVTSWGEAALKYYSYDQIENPNEYHEVCQALLYKKLNKGSKQRSLTDIQDIEIESKTILTYQLIDKFFQKNRVFCDGLTLIVKVNLIKGMISDNLIKGVPWWSDFWVIFNQNTLGNLPQELFYNQEGLRSMMETDKEMEIYKSFIRACHEALRKIYGKIYSRAKEGEAPRFEREYERIRGELGRCYDQQSFNDFLSDFLSRAGLNSALYDQWESILPLLTGQISWEKARNLVLIALASYKPSQKPSEEFSQKSELTPESQF

SEQ ID NO: 708 - protein, 310 aa, Microcoleus sp.
  source 1..310: note = FACHB-53
MYQLFGNLLTHYGSASLNHGQSKGNVSFIKTLLWHDKEHSTVSGDAIRWALRYYWQQQCYAVNRFWNADTFKNILIDEDFDPVRFIDDDVLGYMKTEAAKEEIIEEDSETQGKQDNGKRSKKTKGKSISRLGALGVNRAISLTPYNRTRTFNAKSGGDKDRTSLHFHEYHNTRYQYGFALDPNHLKDKSRIFAVIDGLMSIRKVGGHNNVFCYDFSPESMVFRWTQKNSPHFFYCFEQHSLEVEPIISSDLIEQVEVEDIDGNELWIGGKIAKNLHLKDAHIFLGREQAVADLKRVIARDLDLTEFQPSS

SEQ ID NO: 709 - protein, 215 aa, Microcoleus sp.
  source 1..215: note = FACHB-53
MSLIALYVEVPFATFRQSHAREYGKTYPVPPPSTVYGMLLSLVGETDAYKHCGVQLAIAMLSQPRKSKVLRKLHRFKVKDYSDSRNTILEYQEILTDIKFMVWVASGEERVQPTLAERVEQALMHPTSVQRFGCLYLGESNDLVNVVKLVSDDYRGESRRWLIRDDEGLITLPYWVDHVGSRGTRWLRYRLQEISTQSPPESSWTTISVPFCKHL

SEQ ID NO: 710 - DNA, 566 bp, Microcoleus sp.
  source 1..566: mol_type = other DNA; note = FACHB-53
tcctttttctattctgtttcatctttatttttacctttaaatttatatttaatttactacttgatagctaatgctgtcacctcagaactccttagccgctaataaaaatactaagctgcctcaccaagcaatcaaggtttttgtcactacaaccataagttgagcaaaactacaaccataagttgagcataagagccgctgtaataggcattctcttgttcaggagaatatatcccgatctccatttaacaaccataagttgagcaaaaagagaaatcctaggcataagttggcacaaaatcgcaaaccgtatccccgacaaaaaccataggtattagaccaactctcacctcagtccgaccagcgactgaggagctaccctgctcatcttcaagtgagcatagctatcttcatttgtaaaggaaattgtaatacttctcaataaaaagccttttaagtagaggaaacttattttaaattatggaagtttttgcctatattcaaggaatcactcaacctattaattgaccacctgtgtagcactcgtaaaattctcatcagtttca

SEQ ID NO: 711 - DNA, 345 bp, Microcoleus sp.
  source 1..345: mol_type = other DNA; note = FACHB-53
cataaagagaatgtgtatccctctgaaggtcgtgtatcagaactaatgaccaaaccaggagacttacgcaacaaacaactccgggtaaccttgcaggaattacaatctgaactgagtaggtaagcagatagttactcaatcaagttgaaaaactactgcttcacactcgaccgattacaagcataagttgagcagagcgaattacaagcataaagtgagcattttgctcaacttatggttgtagtgacagtcagtcattattttgagcatatttacgtaaatggacacaactggactcgaaccagtgacccctacgatgtcaacgtagtgctctaaccaactgag

SEQ ID NO: 712 - DNA, 369 bp, Microcoleus sp.
  source 1..369: mol_type = other DNA; note = FACHB-53
aaatcggctctgagcaacgcctatagacataaagccacgaagcacagcccttctcaaacgcctagttagctaagggcttacagccaattttacaagcatctctctgagacgctgcctgaagttacaaatattctttaagttagtgattctctcaatagctcaaatccatattccacagtactttcagagaattgcaagcaccgtcaatcgttcctcaaactctgaatcactcactcaataagctttacagccatttttcctgattcaatctactcatcattcacagatgcttgcaaaaaggaactgaaattgtcgtccaagaagactctggtggagactgagtagatatttcctgcaacctataacgca

SEQ ID NO: 713 - DNA, 32767 bp, Tolypothrix sp.
  source 1..32767: mol_type = other DNA; note = PCC 7910
tgtgactttacccataactttgccgcaacggcaagcttatggttccaatagagggcggcaaagttatgcttccaattttccatatgtagagaaagaagctaactaagtctaccctttttaagtttatagctttagaatccaattttacgtcgtgtttcatttaaagcagcacgaacctgtttgtaacggagatatccaggattagtcattatttcagacacacgagcttctgaagggtattctccttgatgatgcaacttaagtacaatctgcttaacttctctgcaagactgctgtatcttttctgtatgacatgctttactataactacggtatttggcagaaatagcacggcataaatctggaaagtgcctgaaaattgtccgcctatcatatcctagacctgtagctacttcttccattgttagtggtggttctttgtcgcttgcaaggattgctaacaaagcatcttgtacttgattagcatcgaaaagttttggagatgctcttagtgtgggcgatcgccgaaaagttttgtgtgagattttcgtaaaagatttaacagcaagttgttctggttttagtaaatcaagcagagatatttctaagcgataacaaattttcagaagtatatcaagcactggtaaagctttacccgtctgccacatccataaagtattcttcggtattcccatcaaccgagcaaactcggctatattaccatcagtcactgcatctatgagcagactcaaagacttggcaatttcttcttttactggtggagacttaaaagatagggtggaagaaattaattctccaataacctctactatccaagtttgcgaatgtaattcttctttagataaagttgagcaagccataagttctgaggcggacttgacaggaagattcatacctaaccaaccaccacacttagaacagtaaccaggtctcgatcgccaacttagtagtggcaactcttgctgacagtgaggacattgcaaacatagacatattttgtgtaaagcacatactttgacggaatttatagtccaaagtagtggtttataaattacttggttattcaaactccattcttcataacatacagcacaccaagcgctttgggtacgaaacaaattacgtgtgggaataatttcacaccaaaatagcagggtcagcaagtgcaaatcttctataagcgttagcttctgaagcgcttgtactaaatctcttgctatatttcctgtaccatttatggctgtggcacggtcgaaaagagaacgtaaatctctactagttcgagatttcaaaaatatttgttttagtaatggtgtaattattcgtgaaattaatacatctggaggtatacaatgagcttccgctaatctttctatatatcctgtaaggctttccaccattggtgttctaatgccaacaggctgtaattgatacaacaaactacgagatggaatagaaagctgttttaaatcccaagattcgtatgttactaatccattagctaacatcttgctgtactccgatgggatctcttttaggtttgcgtttgccaacctttcctggcggacgagtagtttttggggtttcttcgggtagcacaattggttttgcgccaagtcctaatgcagagcgtaagttttgtatatctgtttctgtttcagataattgtcgttcgccctcttggatttccttgaacattctctgacactgagcaaccgaccaagcacgtttttgtaagtctttgagagtgactgttgttgcttctcgatccaaagcatctttaagagcgcgtgttaaccaatttttcagtatgccaacacatcctaaagtacgttcgtaaaaatattcccaatgactaactaaatctggagcttctgcaagcggcatctgctgctggaaagttaataatacacttttgaaagcttgtacatcctctggattttcagcacaataacggcggaaatgaatatcgacgctacggcgtgagagttgaccgcttaaattacggaatgtcagtaattcgtaagttcctaatagacaatgcaagatacctgtcatatttgctaaagatttgaggcagtctaattgatcttgcagcttatatccgcttgccatcttgccaaaatgttgggcttcatctacaaaaaatacgtctggatgacgatggatgagagcattttctaaagctctgcgtaaagcaggtgcaactacttttgactcaacattgattttgccgaaattatcgcgagagataccacgcacaccgtaatcaaacttgtgatcgattaagggttcttctaaggcgattaaagcgcgtgtgtagtaatctttccagttgaaatttctcgattctggggctacagcttcaacaccaacaacaggaacacgaccgcgatcgctttccagtaatggtaatactagttctgttaatttctgctcaacgcgaagtcgcaaagttgttttaccgacaccgctagggccataaacaaaaataaatgatgcccctgcgggttcggcaattgttcgcatgagaatttcagagacttctttaagtcgaggatgtcctacagtgtaattctcaaagtatgccaacctttctggagcaggccgtgtgaggagttcaagcggaaatccattagtttgtgtcataatgaaaactcctcatacactacaagtgtttctggggtgatcgcttcatcttcagccacttgagtatcagtattttcaaaaggaacttgaattagttttggttgttcgttacggctggttgctgcttttccaccctcaattactatgaagacttctcttgcttctgcgtcataggaacgctgttctagtagagtttcttgcgcttctacagatgctaaaaattcagctaaattcttagctgaaacttgagattgtcgtccataatttgaggagcgtttgcgtaactcagcactagctaacttcaattctttttctgaacgaccttggagttgtgaataatattgagaaatacactgtacccactgtcctcgaacaaaagcataagcgataccaatattaaatgggtcgtatcttgttgggacagaggtattttcaatttgggggtcgcggaaactattagaccagtagtagattgagttaatttttacaccgcgtccaacctgaacttttgcttttccctctgaggttgttggtagggtaagaatctgaaaattctcatcataaggaatcatgcggtgaagccgactgccactcgtcaccatccctgcagcaaacgcatccctcggactctggaaaagcgctggatgttcgtctgtgtcataaacttcgtaagcccaagcacaaagatattcataaagtaaaccaagtgtccatacggcttgatttttagggttaactgatttggtgacttggcggacgttacgagttatttgtgtattaccgagtaagttatggacaaattgagtattggaagtgccaaataagcgttcgcaaaccgaaccaaaacgagctttggctgggggtctttgcttttttgtacattcaaaagtagctaatagtgtttcaaagtaaacgctgtgaaactctgtaccattatctacgactacaatttgcggaagtctaccgtgacgcttgacacaaattcttagcaccattaagcaagaacgatatgagggtgagtcaaacgttaggtatactgccagcaatcgccgtgagtaagcatctacgagaaatgttgcccaaggtctgccaagattgcgacctgtacgagagcaaactaactctacatctaactgagtatggtcgatatgtccaatttcaaatgggcgatcgccgtgtcttggggttttttgggtaagctcccaatagaaggattcatactggtaagcggcacgacgaccttggcgttttttagtttgttcgtaaccagtacggcgttttacttctttagtaaatgctttgtaactcggagcaattacactagattgttcgcaagctagaactaaagccccgtaaacttccaacattcttttttgtttcagagtttcatagtcttctaaaataaacctctccataattgctaaggtgtcttcaggcagcttgcgctgacgattacctttgacactgcgatgggacaaaagcccaatgtagccgcaaccgtatttttgaagtgcagttagatatttagctttccagtcacgaatggtacgggctggtattgtttcgttttctgggggatgtccgtttaagtaaggctcgatagttttgtagcgttcaagagcctctgcttggtcttcaggactagcttgataaaatcgctgccaagattctgtgctaatatctgttttttctggtgtttggagactggtgatttctccttgacgaaccagttcctcaaatacattttttttgaatttaattaactgatcattttctgcgccaagtatcacctctgtttctccaacaaggatgatatttaaacctttgccgtcccaactaacaggcgtgccagtagcaatattaattacaggagagatagccggaagacttacatttggctgctcaaccattaatctataagcactggcagtttgttcgtcacggaagattagacatctttctggttcagcaagtggtgcagcatttaaatcaaaatagatttgctcttgaacaattaaggtgtaaatatcgtcagatttagctcctgtttgctgatggagtaattctgctaaagtgattcctggttgagatgacacaattgcaagtaatgattgagcgatcgcttgttccactcctagggattctgagcgatagtaatcttctaaaaattgcaaattacgttgcagaacccaatttatttccttatctgagcgaatgcggtaataaagcccaaattggtcagcatagacttctcctggcggacaatgccattgattatcttcttgagagtaaaagtaacgattagggtttttctgagctagttttttcaaatcctgctcagttttacactcttcccaaccagccgaattggttcggatgacaaataaatctggggtgtgtaaaacgcctaatctacgtccgttacttgcttgatagtctagtttaatttgcggtggttgatcgtagaattctagaacatcttcatcgtgttctaactgatagataactggcagttcaacccgatgagactcgaattgaatcgtgactcccatcttgcgactagggtagcgtcccgcaacattcttgctaccgccaccaacgcgacgggatggctcagatgagcgaactttctcaataattttttgccctgcctcggatatttgaaggcgagcaacccattgttcaaattgctctttcatatagtccttactaagcgctttgcacttgattttatgagtctatgaaaataagaccataaagttaggaacctgcttgtctgatgctatattacttaactttataacacttatagtgtgcaaaaatccactgatagtagatagatttaacggcaatactggttcagtatggttttgtgacacaaaaacacttcagtattgagtaccgctttggcaaagcgattaggcggcgaaggcgagagctagatttatcccaagaagcactggctgaaaagtcagggcttcatcgcaactacatctcaggtatcgaaaacggagagcgtaacccttcgttaaaaaatattgttaagttagcggcagctttggagatctctgtctccgagctcttcgttaattacggcatcgaggttaagagtgaatcggaaactaattcctgaaatttggctgttaaaactaaagtaccagcgtaatggttaatccaagagggatgactatttacttagaacattggaatctaaaacctttagaaatcccgcaacggagtcggttattctctcttgaacctgtggcggtgggaactccctacgcagaaagtcttagtagctatctccatcgtttggcgcaggcgcattgtttgacatctcaaaagctcgttatgggagaaattgcgccactgatcctcaaagatgaggataaatctgagctattgtcaaaaaatctgagtcacctattgggaaatagtgacgcgaaaccgactatcaacggaatgcgagaaatgacaggaaagttagtcactatcttagaagagttaacaatgcgtcaggatttacgctttttgacccttttaagctggaaaggaatgatttatgacaaggggttatttcgcaactaccgcgcttggtgtccttgttgttgggaagagtggatgcgggagaacaaaactatctatgaaccattattatggtcatttaaggatgtagaattttgtgtgattcacaaacagcgattaatagaagaatgtcctcattgtggttcgcgtttacctataatggctaagttttcacctgcgggattttgttctcgctgttatgggtggttaggacaggaagttaaaggcgaagaggaaatagagaaatatcgagttaatattcaaggaattagtgaattaatcgcacttactccccaattaggatatgaacctattccaatcgagttaacccgaaaattacaattaattttgttggtgtttgaacaagcaattggcaaggatttgaatttattgggggatttagggagaatcatggaatcgttgaggattgcctcaaaaacaaatcaaaatcagccttatcatttagtgaagttgattattcctgtgtgtgagaaggcaaaaattagtgtatcccagttgtttgggttagattttcaggaattgggcaagatattgttcgggaattttagtctggaattaaagttgtagaaatttagtatcaattaaagatgcctcgaaaagcccgcgatctcaagcctaactgctgttaccacatcattacccgttgtaataatagggaatttcgcctaacaagtttggaatgtcgtgaagtcttcctttatgcgattaaaaaagcccaggagaagtatggatttaaactttatgctctgtgcataatgtcgaatcatgttcactacttgttagaacccaagcagccagaggaattacccaaaatcatgcactggctgaactggtatactgccatgtattttaaccgacagcactggcagcaagagttcatttgaagtttttgctagttcctgtaataagagttcgcgtgtcgtcatgatggcgatcgcccttcctagaacttgttcatcattataccaatcgcgcttttgctcaatacttaaacgtgaaggcagaagctgctacacagtgcgcgaaacactgaaacgtgaagacggaagttgctacacagtgcgcgaaacaccgaaacgtgaagacggaagctgctgcaaagtgcgcgaaacaccgaaacgtgaagacggaagctgctacagggaagataaaacaaagaaatgtgtcgatagacgaagaattttactccccgtgatcaagtcctggcgatcgcacaattatataaaggtgtggtcttggcatcagcagcagaatagttgatagtgcgatcgcccttcctagaatttgctctcagtataccaatcgcgcttttgatgtttttccaaaatgcgatcgccttttatagaagttgttctcagtataccaatcgcatctttcccctgctccctactgcctgccaataccgtcgcacaagtgcctgtcactctcgttgacataagaattattctgtaaataaccccttacccaatcgcaattgtcctgtattaaagaatctaattttaatttagattctaagtctggaagattccagagtttgactgtatagtcaccactgccagaagccaatgtcttgccgtcggggctcaaactcacgctattgacagagttactccctgccaaacggttgcgttctcttcgttgaaaacggactgtctacaacgcattgattacttctgagttagttgtatgttggctttgcagaatttttcctgccttaattgctgggacaaaagcgtctaattcatttccttgattaaatagaaacaaggaatttctaccaagagattcggctagattgagatccgattgctttgtctgattccaagccatcaaacccaatccaccactaattaccactgctaccaatgaacccgccgcaatgccccaggcggttctgatttcgcgtttcctgcgggctacttcagcttgtttaagacgctctccttcttggatactctgctcgataaattcttgctcatcaattaattcttctgggcgttccttgagtttttcttccgcttccgccaaagccgcaccccgcaacaatgaaccagaatctcgctgcgttgcttcccattgtgccttggctgaacgcagtcgctcttgccaagctctaaaaacacggttagtgttcatccattctcgcagttctccccaattgcgaatcagcccttcatggactacctctactgtttcttgactggtagcattgcgacttgtcaccaccaaccgagcatcagctaattgttttactaaagcccagctttgttcccccaattgcgtttttatcgctatgcgtcttgtatcctctgctccctcaccaggacgcaccaattgaataaaaatccggcggactttttccttctcctcatctgtcaagttgccatatttctcatcagcatggcgagctaacgcaccttctacttgcccaatttcttcatagattttgtgagttaattgtttacctgtgcgcctattccacaactctgttaatgcaaactctagcagaggtaaatttcccggttggttttccacatcctccaaaatgcgttctaccagtccgctttcaaatctcacccctaatttttgagcaggtttttcaatgacttgtataagttcctcccgattcatcggccctagtttcaggccagcattttgcaagacatccgcaaagggacgataggagagagcatttcccaaaaaatctgcccgcatcgttattaccaataccgtagcggatgcagataaagacgtgggagtttctatactggctaataagcaatcgagaaactgacggcgaattttctgattgttacagagagtgtaaatttcttcaaattggtcagcaatcaatagcacccgatgatgagggtgattttgccgaatttttctaaaaacatcagctagagaaacagtgttattaaacaagtagcccgctagttttcgtgtttgggcaatttgttcagtatgatctaactctggtgtataaagaggaataagtgcctcagctaaagcataaaatggtacagcaccaggacgaaaatgagtaaattgctaattacctgctttttctaacttcggaactaaccccgctaataccaccgaagatttaccgcttcctgatgcgcctagcaccggaataaaattatgggtttgagttgcactataaagtccttcgatatatagttcccgcccaaagaaaacatctgcatcattggggccaaaatgaaacaagccgcgataaggacaagggagatattcatcagcaacatctacagatgtaggttttacctcttctctgtagtagaaataattgtaaataatgttgtgatcgccaacttgagcgcccttgacttcaccttgaaactccgtacgtttttggggaatatctccagtcatttagatactctcgtggcttttagctaaatgtatttgtttgtgtgttgcgatctcctacctgagcgcccttaacttctcctttaaatatcgcaggttttgtcagaaatatcgaccacaggcgaaaccagaaaaacgaaaccactggggtagtcgctttttgccttcggtggtaaagggtggggagtcgaaaaagtcgtcgccagggcaaatgagcttaccttgggacaagcagagggtaacggagagtacggaggtgcatgaggtagcagaaaaatttattcaggcaaactgttacatcccctcggtgccaggtatctttgagaagagcgttgtgataaatgtttacaaacattctggaagccttaaatgttagactttacaagtctctgcgcgagagaagagagtccaacacatccccacaccaatctctccctccaccccaaaacccatcataaatccatcccccaaccactcctccgccttggtataaattaatactggaatggtggctgttgctggtatcacactttcttcactctcttctatgtctcccatgatttcattatacgttttatactcagacccccaaacgcgaacgcaaaactgtctccactgttcctgttcccaagtctcccctccacttagactctggtaaatttgactctggatgctaatacctaatttattgtcactattatcaagccagagttgatcaattgccctgagagtttcacaggggaaattctttaacaaatcatcccaatatgcatatttttctttaaccatgacttggtagaaaatccaagcagtttcttcgtctgcctttcgccactgtctttgcctcaaataatttgccaatgcgtcaaatagtccattttctactaagtcatcagcacattttctcaattccaattcaaaagccttatctgcttctgagttatattgaactgctaacatttgataaaagccttgtctgaagcgttcaggattttctttattggcgaatttcaagtgaaaaatttcttgccatttttcttcgctttcattattttcatttccccataactgatgtaatttttcataagctctttggtagagagaatagacgtttggtacttcagggaggtggatattggtgataatatggggtaaaatccgtgaaactcgataaaccctattttcttcttgaacttcaggactgacttcaatcagccccagatttagtccccgttgtaattgctgttgataattaggaagctcatcacaaactgcttctaaagctaccatcggtacaggaattttataaactaagcaacagctaagaatcttctgtaatgcttcatcagtaagctgatacaattcttcccaaataattttttctttccataattcgggacttttttctagtttcgttagttcattctctgggtcttttttgcttaatacttcattgttgataaattccaataaacgaggattgccatctgctagatttaatgaccgttctcgtaaatcttgaggtagcttatcagactgaaaattctctaagcgattgagttttttagtcagttcagaccctttaagtggttgtaagccttgtttatagaaatattccaataagtcagaatcaaaatcatagcgacaagtaataataaccctattgtcagttcccgtttctttgatggcttcaactaaagattctaatattggggctgcttgaggtttaagaatgtatctacctgcacggggttcgagattccattcaaaatcgtcaagaatcagaagaaacggtttttctcccatttctgctagttgacccaataggtaaattaatcgggattttagttcaatctgactattttctagatagggaattagttccagttgcgctggtttaatcagtttattcttgagttttctaatcaaataagattcatcaatttgttgccaccagagaattttttcatgttctggcaacctatcccaaagtcgagaggcgatggtacttttcccccatcctcccataccctgaattaatatccctactttgtcaaaatctgtcctcaaagtccgcaaacaattctgtaattgacgacgacgaccaacaaaatcctctcgtttaacaacccttaaccgattttgatcatccctgaactctactttagtagaaggttttggcagttgctttcttccccttgtccttaaggtcgttactaaagcttccggtaaagtattcgccacatacagccgtaatttatgccaatcaggggttttttgttgaatcagtgttcggtaggtggaagataaagcctgtgtcaccgtccccccttgtgacaattcccaatacaattgactagcggcagcagtggcatcggtatcgcggacattttgaccccaacctagtacagcagttgcacccattttagttgcacccattttcaataattcttctgccattgagggaactgcactatcagcagaataacctgtacggcaaccagagaggaaaattaaagacgggaatctaaattgcagggcattgtaaatatcggctgtactgctatccactcggttgccatattcgtcttcagtcagaaagtagggttgtccaaactcatgagtcgcatgacctgttaaatgaaagatatcaaagtatcctgtttcatattcccgaaccacataactcaactctgttaaacagccactttcttctactctcaaatctatgggggtgcgcttggttgcctctaaaattttcccttcctcagcttcataatctaattcgggggtaacttctaacggcgaagttgccataaacagcacatttagggggcgattttgaggagagttagctgtagttatcgctttaccattggatacccaccgcacgggaataattgggggtgttttctctactaaaaaactatgaccatcatgcagaacttcccaaggtaaatgagctagtcctttatctgtggcgatcgctataatcaaaccttggggatgaggttcttttagggcattggctaaaatgcgatcgctcttgtctagccagttgtaaagtgcttgtcccgtggtagcataatccactgggagatgggtatagtagtctgtttctgctttaccacttaaccctttgatttcagtcagacgcagtttgtgttctttgtaattatttggattgtcccaaaaatagcgtaaagaaacatcatcctgtccttgcagggtcaaactaatgtggagaatcttcattgctacttgtagttttctagaatctctttgatttgttctactgttgcgtctttgagcagtaaccgacgattgtcatcagtcacaattaaaactttctcaatcctggcaccagttgggtcgtgtaaggacttttgatacttctccttccacttgtgaatgctctctgcaacggtcaatgttccactgataattcccacaatcgtggcgatggtagctaaggttccttccctctcggcttcttctatggtttgagagcttccttctagtccctcaattgctaaaagttcttctgtagcggttactgcatctcgtccttggatttcgattttcatattgccaaatctttaaataaaaatttcgcagagagaatttagttaaatggcgcttatatttgtacttgaagtatttttgatcaaactttttagctctaacatttgagcttccaatgctgccactctctggctcaacgggatttcttcacttacatccagatactgagccaaagcatttaaaatcacttcggttttggttaagtgagtttcggcaatatagacttctaaccgcttgtgaagattagttgatattcggataccaatagaaatattagacactagtagaggaggtgagaaactgtctaacaaaactgtctaacaatgtagcacgaggtttacatcccacctgggaatctatctaaaatttttagattccttggaaatgcgcgatcgctctacgaatagcttcagaaagcagagcagttctagtccgaagctcaaataaatcgcgctttgtagctaatttgaccttgaatatatagagtcggtagtttttacatagcaatatcttagtttcatgcttaacaacagctaagaatggagcgtagaattatactgcgactactcttaaccgaaagccgaacttctttatgtcagaagcaattgacaagaaatctttgagtgaacgtgatatctgtacaaagtttattacacctgctttgactaatcggggatgggatatcaacactcagattcgagaggaagtgacgctgacaaagggtagggtgattgttaggggtaagcttgctagtcgaggtgagcataaacgcgctgattatgtgctgtatcacaaacctggtgtacctctggctgtaattgaggctaaagataataatcacggcgttagcgcgggaatgcaacaagcgatcgctactggtgaactaattgatgtaccgttcatctttagctcgaatggcgacgcttttatgatgtgcgatcgcacgattacccaaggacagcgagaacgggaaattccccttgaccagtttccgacaccgcaggaactttggcaaaaatattgcgattggaagggaattgactcggaaattcagccgattgtggctcaagattattaccccagtcctgataaaaaacagccacgctattatcaacagattgccattaatcggacaattgaagcgatcgctaaaggacaaaaccgcattctgttagtgatggcgacgggtacaggtaagacttttacagcttttcagattatttggcggttgtggaagtcgggggcgaaaaagcgtattctgtttttggcagaccggaatattttggttgaccaaactagagttaatgactttaaaccctttggcgcaagaatgaccaaaattaagcagcgacagatagataaatcttatgaaatttatctctcgctgtatcaagcggtaacgggaaatgaagcagcgaaaaatatttatcgccaattttcaccagatttttttgacttaattattatagatgagtgccatcggggaagcgcggatgaagattcggcttggcgagagattttggaatattttagcagtgcaacgcagattggcttgactgctactccaagggaaacagaagaagtttctaatagtctttattttggcgagtcaatttttacttattcgctcaaacaagggattgaagatggctttttagctccctacaaagtcattcgcattgattttgatacagatttgagtggatggaaacccaagccaggacaaagagataaatatggtaaggaaattcctgaccaagtatttaatcagcgagattttgatagaactctggttttagagaagcgttctgaattagtcgcacggattatttctgattatcttaaatcaagcgatcgctttgccaaaactatcgttttttgtgagacgactgaccatgcagaacggatgcgggtagcattggtgaatgaaaatactgatttggtggcggagaataaccgctacattatgcgaattactggggatgatgctcagggtaaggcagaattagataatttcattgacccggaaagtaaatatccgacgattgttactacttctgagttactgacgactggtgttgatgctaaaacttgcaagttgattgttttagaccagcgcattctgtcaatgactaaatttaagcaaattgttggtcgcggtactcgcattgatgaagactacggcaaaatgttcttcaccattatcgattttaagaaagcgactcagttatttgctgaccctgattttgatggtgaacctgtacaaatttacaagcctaaacctaacgatccaattaatccgcctgatcatggggatgatgatcaagtcatagatgatggtgaacttagccgcaagcagaagcgagaaaagtatgtaattgcggatgaagaggtggcggttgcatttattcgggagcaataccacggtaaggacggtaagctgattacggaatcgattaaggactatactcgcaaaacagttagtcaggagtacgcttcgttagatgcattcttgaagaaatggcacgctagcgagcagaagcaggctattatccaagagttacaagaactgggtgtgcctttggaagggttagaaaaagagattggtaaggattttgaccctttagatttgatttgtcatgttgtctttgatcaaccgccactaactcgcaaagaaagggcgaacaatgtccgcaagcgtaattactttagcaagtatggcgaacaagccagaacggttctcaatgctttgttggataagtatgctgatgaggggattgaagatattgaaagtttggatgtgttgaaagttaaacctatcagcgatttagggactccgttagagataattaaaatttttggtggtaagcaagcttatttacaagctttgtcggttctgaagtcagaactatatcgagtatcttgaaaagctcaatttacatttacaatagtcagaatcctcctgaaataaatagttacaaataaatgaatatcttgctattttacattcttaattattaaaccatactcactataaacatctgaatacaaaattgttatgcaccagtatttgattgatacagaatatgcaactataaatattatcgatttaataatgcatgataaacgagaacttgaacaagcaaataaaaaatatcatcaagtgcaaaaagatttaaaattctatcagcagcagttgtatgcagcagatatgtcagatgatctaagcccaatgcaacttcaatatgaatacttgcaatataataagcgaacagagaatttaagtaagcaagaagaatttttaatttcacaaatagaagaattgaaaaatttaatagatgctaaatctgtggctgtatcctctctttgcggtgctttactccaaatagcgaaacaaggcatctctattgtgcataaaaacttgatatcttgccctgacggaaaaaatataggcagtgaagtactaaaaaatgtaatttggcagggacgcaatcaatcaatgcactatgaagatggcaaatttcaaccaccagttacaaattgttttcaaaagttagaagcttcttttggtaatgaattttcattaagcctacactctggtgaaaattttgcacaaaaaatagttataaaactttttggttggaatgactatcaagtgtataaacaggatatgatttctcttctaggttaatcgtgccaatcggcgatcgcagtctcatattatgtcaatcagcactacaattaagactattcaagatatcatgcggaaggatgcgggcgttgatggtgacgcgcaacgcatcagccagttagtttggatgatattcctcaaggtttttgatgctcgtgaagaagaatatgaactgctagaggataattataaatctccgattcctgaaggtttgcgttggcgtaactgggcagcagatgcagaagggattactggagatgctttattagattttgtcgataatgctttatttaaaactctcaaagaactgagaactacggcaaccgatgcccgtgggcgaatgattggtaaggtgtttgaggatgcctacaactatatgaaaaatggcactctcatccgccaagtaattaataagctcaatgaagttgattttaataaaaaagaccagaaaaaacagttcagcgaaatttacgagaaaattctcaaagatttgcagagtgcgggaaatgccggagaatattatactccccgtgcggtgacaaagtttattgtcgatagaatcaagccgcaattaggcgaaattgtccttgaccctgcttgcggtacaggtggctttttaacagcagcaattgattacattcgccaaaattttcaaagtgctgatgttccagaaattctgcaacggacgattcgcggaactgagaaaaagccgttaccttataacctttgtgtgacgaatttggtattacatggtattgatgtgccagaagcagaacatgataacactttggcacgaccattacgtgattatagtccgcaagaacgggtggatgtaattattacaaatccgccttttggtgggatggaagaagatggaatagaagataattttcccgctagtttccgcactagagaaacagcagatttatttctggtgctgattgctcatttactcaaagaaggcggtagaggcgcaatagttttaccagatgggacgctgtttggcgaaggtgtgaaaacgcggattaaagaaaaactgctgcaagattgcaatctacatacaattgtgcgcttaccaaatggggtatttaatccctacacaggtattaaaactaatctactatttttcactaaaggggaaccaacagaaacgatttggtattatgaacacccttatccagcaggttataagtcatactcgaaaactaagccgattcgctttgaggagtttgcaccggagcaagaatggtgggataaccgcgaggaaaatgaatttgcttggcaggtttcaattgctgatttgaaggcgaataattacaacctagatattaaaaatcctcacaaagttgatgtagaacacgctgatttagatgagatgttagcagagcatcaaaaactcatggctgagttgggtgaggtgcggagtaagttgaagtttgaattaatggaagccttggaaagagatgaagcttgaaactttttttgaaaattttgaattgttgactgatgcgccaaatgcaacagctaagttacggggattgattttgcaattagcagttcgaggtaagcttgtttgtcaagactcaaatgatgagttggcttcacaacttatagaaaaaataacattaagaaaacttgatttaattaagaaaaagaaaattaaatcaactgaaaaattgccaacaattaaagagcaagagatagcatataaaattcctagagtatgggaatgggtacgttttggagatattactatctgtagagatggagaaagaattcccttatctagagatgagagagttacccgtaagggcgattatgactattatggagcgtcaggaataattgatcaaatagatagcttcttattcgatcagcctctcttattaattggagaagatggcgcaaatttaatcaatcgttctacgcctattgcatttatagctactggtaaatattgggtgaataatcacgctcatgttttagatactatttcacttgattgcttaaaatatcttgaaatttatatcaatgcaattgatttaaagccttatattacaggcacagcccagcctaaaatgaatcaggctaagatgaattccattcctgtttcattaccaccacttgcagaacaaaaacgcattgtagagaagtgcgatcgcctgctttctatctgtgacgaaatcgaaaaacggcagcagcaaaggcaagagagtatagtgaggatgaatgagagtgcgatcgctcaactcctctcctcccaaaatcctgatgaattccgccaacactggcagcgcatttgcaataattttgacttactctacaacatccctgaaacgattcctaaactgcgtcaggcgattttgcaattagcagtgcagggtaaacttgtgcgtcaagatccaaatgatgagcctgcatcagcactcataaaaagaatgatttctaagagagataagctgatagcaaacaaaaaaatcaataattataagcctcaaccacctattgaacttagtgaaatttcctttaatctacctaatggttgggagtgtgttcgacttggagaaattacagatattgttagtggtgtaactaaaggtcgtaatttaactggtagaaaaacgacatattacccatatctgcgagttgcaaatgttcaaagaggttttctcgatcttgaagtgatgaaagaaattgaaatacctgtagaagaactagaaaagtataggctcctagttggggatatcttacttactgaaggtggagattgggataagcttggccgatctgcaatttggcaaggtcaaattcaagactgtatacatcaaaatcatgtcttcagggcaagacctttagatgatggtttactttcagaatgggctgtaatgtatacaaactctcctgtaggaagacaatattttgaaacagcagctaagagaactacaaatcttgcttctattaacatgacacaactgcgttattgtccatttccgctaccaccgcttgcagaacaaaaacgcattgtagagaaatgcgatcgcctgatgtctctctgcgataccctagaagccaaattgaaacaagggcgagatagcagcgagaaactgatggaagtcgcagcaaagcaagttttaacagcctgataacttcttagcgtttcctattcaatcagcttgcaagcgatcgctgaatactgttaattcaaaagttgagagagtgcgatcgtagtcttgaggctatgactggtaagcgatatagaactagggcgaactttagaggagtgtgcggcaaagtatcgcaggttttgtcagaaataccgaccacaggcgaaagcagagaagcgaaattattggggtagccgcttcttgccttcaattgtaaaaagtggaaaggcgaaaaaaacatcacctggacaaatgagcctaccttgggacaagcagagggtagccgaaagtacggaggtgtatgaggtagcaacaaaattcattcaggcgaattgctatcaaccaccaccagtgccaggtatcggatttctgaaatgtttattattgcgtggaaaagagcgttgtgataaatgtttacaaacttctggaagccttaaatgttagacttttacaagtctctgcgcgagagaagagagtgcacacctatctctaacatcctaattacctcccaaattaaaggtacgccaaaattcctgtttaatatggtataaattaatactggtatggaggctattgctggtatcacactttcttcactctcttctatgtctcccatgatttcattatacgttttaaacctagacccccaaacgcgatcgcaaaactgttcccaaacatcctctccacttagactccggtaaattctactttggatgctgatacccaatgtattgttactattgtcaagccagagttgatcaattgccttgagagtttcacaggggaaattctttaacaaatctacccaatcttgatatttttctttaaccatgacttggtagaaaatccaagcagtttcttcgtctgcctttcgccactgcttctgctgcaaataatttgataatgcttcatataatccatcttctaccaagtcatcagcacattttcttaattcagatttaaaacctttatcggcttctgagttatgttgaactgccaacatctgataaaagccttccctaaatcgttcagggttttctttattggcaaatttcaacctaaaaatctcctgccatttttcttcgctttcgttctgtttattaccccataactcacgtaatttttcagaagctctttggtagagagaatagacttttggtgcttctgggaggtgaatattggggataatatggggtataatgcgtgatactcgatacaaacgattggattcttccgcttcgggacttacttctattagtcctagttcaatcgctcgatttaactgtttttgatactcagagatagactcacaaacagcttctaaggcagatctggggacaggaatttcaaataccaaacatcgactaactattggctctatatactggtcgatttgtaatcttggggcatcatctcgctcccaaataattctttctctccaaccatgagaactagtttgatattgactaagttgtctttctgcgtcttgtcctaacaatacctcattgaagaattctaataaacgaggattaccatcagccaaaatttcggcttgctcaattaaatttagagaaatttcctcggaattaaaagctgttaagcgactcagttttttctgtagatccgatttgcggaaggattctagaggttgtttgtcaaatgattcatcctggtctgattcaaagtcataacgacaggtaataataatacggtggtcggcattattttctttaattgcccatactaatgacttcaatatttctgctacttgagttttgagaatataccttccttgacgatgttctaaattccattcaaagtcatcaaataccagcaaaaagggtttctccccagattggttcaactccgcgaacacatctcttaatcgatatttgagttcctctttgccttccctaagtgctgtccttagttctgcattcctcagtttatctgctagctgactcaccaaactagattcatcaatttgtcgccaccaaatgattttttcactttcagataagcgatcgcacaatctcgcagcaatggtactttttcctaatcctcccatgccatgaattaaaaccccaatcttttctgaatagggcttgagtacccgcaaacagttttgtaactggcgacgacgaccaacaaaagtctcacgggtggcaactctcagtttcttctctgggtctaaaaactcttgagcaacagaagcacgaggtacgggtttacgtccgcgcttgaccaacgcacccggtagagtttctgccacatacaagcgcaacaaatgccaatctcgtgcttgattttttagcagtacttgataagcgatcgcaattgcttctgtaagcgtctttccggctgacaattcctggtacaaggcagcagcagtagcagttgcatcagtatccaacactcgctgaccccaaccgataacagcagttgcaccatgctttagtaatgcctctgccattgatagtaccgaacctgcgtcccttgagtatccagtattacaaccagaaaggaaaattagcttaggcagttggaattgcaattctgtagcgatgtcttctgcactgctgtattctgcttctcccaattccgtctcagtgataaaacgtggttttccatcccgaaacgtagcatgacctgtcaggtggataacatcaaagtaattcttctcgttatcatccaccaaatagcccaactcttttaggcaaccactttcttccactatcaacgataaaggttgacgcttcgttgcttctaaaattttggcttcttcagcctcaaacttcagttccggttcgattcccaatggggaagttgccataaacagaacatttaatgcccgatttgctggctgatcttccggtgttagttgtttagaatcatcatcctttacccaccggatgggaataatcggaaaaggtcgccgattcagcaaaaaatctgtactatcgtgcagtatttcccacggtaaatgagcgagttttgcggttgcagcaatagcaagaacgataccctcacgcttatgctgggaaatagcactttgaaaaatgcgatcgctcccatctaaccagttataaagtgcctgcccagtcttagcatagtcttcgggcagtctggtgtaataatctgtttctaccttttgaatcaacccagtgatttctgtcaggggtagctgacgagactggcaattgttgggattatcccagaataaacgcaactgagcgtagcgatcgcccacgggtttcagatcaaggtggagaatcttcattgctacttgtagttttctagaatctctttgatttgctctactgttgcgtctttgagcagtaaccgacgattatcatcagtaacaatcaaaaccttctcaatcctggcaccagttgggtcgtgtaaagacttttgatacttctccttccacttatgaatgctctctgcaacggtcaatgttccactcacaattcccacaattgtggctatggtggctagagttccttcccgctcaacttcatcaatagtttgataacttccttctaatccttcaattgctaaaagttcttctgtagcggtgactgcatctcgtccttggatttcaattttcatattatttgtttataaataaaaacttctcagaaagaatttacaagttatgggcgcttatatctttacttataaaaatattagacacgagtagagatgttagaaactgttaaataaaatagcacagggttcacaccccacttgggcatctagcgaatatttttatactccttgagaatgcgcgatttatctacgaatatctccagtatgtaccgcagtacatcaaaaggagcgcataaccaaattctcctaaaagataggcagaaattagacagtcgatactcgcacttcttcaacaaattattttggtgtcattgtccgtcattctgagcttgtttaatcgctcgtttcaaaattaacaccgccatttgagacaaagaacgctcctctgcatcagccaatttttgcagggcttctttgtctttttcttccatgtaaatagttacagttacttttcccatgtcatcatcataagccaattagtgtgtttctatatttatcgcataaaaacacactaattaacataaaaaaacttcattattgcgtataattacttataagtcaaaagccagccatcaactttctcagggcggatgctggcttttggcccccctatcacaggagacatatacaatgttaaagcctgttagctataaaacagatcaacaccgagcttatcaacaagctttagatgatttcggcatcaccgaattactagcaaagctcaaaaactactccgacgcagactttgatagcacctggatgcaactccagcagcaagaaatagaaactctagcggcaattctgatttctgcgttaactcacagcatcaatggtaaattgcttggggcttatctccatctcatccgccacaatcaccaagatatagccccaggtttgattaacctcaaatacccagacgcatctattgagcttcccgctaactttcctgacgaagccaagacacccagatttttatatggcgatcgcttacgttggctctctaatgaaagcgatactgactggggtattgtcattggccgattttatagctttgcaagcgatcgctgctgctggaattggtgctacctgatttggttaagcaaagatagccccagtgctgcttggatatctgccgatattgcttgggaagaagatttagaacccatcagcgaggaaacagagttatgaatcctcacccactccaacagcgagagcaagatttgatgcaattctacagttattgccaactgggtatgactcctaagcagttttacaccaagtggcaggtgaactacgaagaaatggcgcagatttgcgatcgttctctttccaccgttcgccgctggtttgctagaggtaaaaactaccgtcgccccatgccagccgatttacgccaccttgccctgatgaactttctgctggaacactttgaagagattcccaaagaagtgttgcagaagttgtgttttccagacgaaagtgagtaaaaactgcaactaatttcaatatcaaaatgatatttcttgccagcctgtgtctcagtaggctggcttttgtcttggaatttacagatattaccaggagaacttcatgacttaccttgaaaagcttagtccttggtgtatagtccggcttttacctaatatgcagaaccagattgtcgctcgttttcgtcgccgtagtgatgccgaagctcatttacaagttttgcgccgacttattcctggtgtgagttttacactgattttcaatgctttcaagtaacatcacgcataaaatgcttagtgcaaaatccttccattaagtttgtcaagataaggaaggattttgcagattaataggcttttggataacaagtaaattgagtagcgatcgcatttatgaaagattggagtaaaaatccaaatttataaacttatacaacttgatatagctaaaaggcttgatattactattaatttacattaagcatttcaagaaaaattaggcaaattataaagtttttagtcttatagttttgtctgggcaactaaaacagaatctatcagtaaatctcctgtctttgcgcgtaagtcttgaattgcttggttcagcactttaactgcatcctggtgttttgtttgtttacccaactgaaatgcctcggaaataacttgatcacaagcatctgccgatgccattctacgacataccaagtcaaatccagcatggtcaattacatgaattattagctgctctaaacaaatagcttttttatacaatctttgcttaacgtcgttgaagctagataatgctaacgatgttaaaaatcgtttatctgacgtaagcaaataaaaatcttcttccgtttgagttgcagcaacaagtaaagcctcacccacatcaattccatctgtagaagctaacatttggtattctggagtactacagatagcatagtcatctattgttttacatctatccgttatttgtttcgccctttctatgctaatcggtttaaattgcttactaatttttcgagaagcgctaaaaacttttgccgcagtaggcaatatgcgaatattttcgtctttagtatttaagctagcaaccatttcccagaatatttggtatgctgccagctttaaaatgacatcattatctgtaaagtacagcagcaaagacttgctcctatttcactccttcacttaggagcaattatactcctgttacgagtttaaggtattcttcgctgtctgtgtccaagctttgccagtctagctctttttctagatagctattgattttaactgatgcattagccacaggctcaagtatctttaatgcacctccagcaatgacccagtcttctttctctcctttttgccaagcataatttaatgctaacgcgccaggatctaccatatctttatttcctaattgccgcaccatccgcgctatttgtatggagtcagatatcttaccccatgcatatttatttttctctccaaatagaatgatttcggcaaactcatttgcttcttgctcttctttgtcttccgcttccttaattatcttttcatcaatcagaacacagtccttaacatgaccactggcaatatgtccaatttcatgaagaatgataaaaagcaagtaagcagagtattttcgattagagctaagtacaattactggacgctcattaatcactgctgccataccatccatcttgatgcttcctttaggaaattcagaaaaatggactactggaatcccacaattccagcaaaatctgagaatagcatcaaggtctatgtaataattatttttcaggataaaattccgaatttcaaatgcacttgttgccatatctgtaaaaggttttttacaagcatacgtaaccatctcagctacgcgagtagctagcccttgagcaacaattaatcggctctcatcagaattgttttgtatcttcttaaatttagggcgaattacttgcttaaaagtaataggagcatcaggatcaaggactgatgccatatctagccctaaacgtttagcaatacgtcctgccgcttctaaaacagctacaggattattttcaagttctgcatcccaccattcaggtaaggctttttcttgaataaactttggctgtaatcccacttttgataagcgtttatacagcattggcatttcaagggttttattcataatttccctcctctgcctattctcaatatgtggccccttgttgtgaattacaaaaaaattaatataacgacgttatctatatagtgacaccattatgccacgatgaaaattgccttgacattgagtatgcaaatatgcagcaaaaagaaccagagttttaaacagactattcctttcattatagtacatttgtactttaaacataatcaagaatcagcattattcaagctcctcgagttaataacaggcttctgatacgctgccatttcttgaaatggtgttttacacgtatgacaacacccatcctcccacagtgcaggcattttgagaggagcttcacaacttggacacttcgctaaaagcttaaattgatggtgatcgcatttccacaccgatgtatattgccactcaatgcgatggcagggattttctctataacaagccccacataagtgaattggctcatgctgcattcccactccagcaggtggtaacatttgggctaattcggcatctacttctaccaaagatgcgagcgcttcgccgtccaaaggaatcgccaaagatgggctgtcatcgcctgaacagtccctgaaaatagcagagttctacaagtaagcggcactagaggctttgtgttaaggacaaacagtgattcctttctggtgcgatgtctacggcgcattacgctaacgcattcatcaacaattgaatggaaatactgaaagttttgggagctgatttgacatttatttctattctcccgcttgctgaacaaaaacgcattgttgataagtgcgatcgcgcaacttgactttgcaattcaaccaattcagcaatcagagaaagcatcctagtacgaaatcgattcggtttctgatgtatttggcagtttgtaacgcatctggggtagataaaaaggaattaacctactcggcactttctatcaaaacattaatggtttttgaatttcgcaacccttcaacagcaattagcgcttaccttggtacagtgacacaaaaataaatatatccagattgagcaacgcctaacggcatcaagccacgaatcacttggttttgacctttgtccccaaattatacaattttgagcaacgcctaacggcatcaagccacgaatcacccaatcacaaaaagtctctaccaaatcaactaaatcttgagcaacgcctaacggcatcaagccacgaatcaccaagaaatcaacaaatcccactaagtcctgttcagattgagcaacgcctaacggcatcaagccacgaatcacctgctggctaatgggttcaacattcaaccataaatctgttgagcaacgcctaacggcatcaagccacgaatcacagcaaaggtgaaaacccttaactgaggaaggctcatttacaatcttacaagtacctcccaaatcgagaaaccaaaaacgcaaaacttagcaaaccttcccttactttcagcccctcaaacccagtgtcgataaactttcccaaaaatggcaagcacctttttccttacctcaattaccatatcccttaccgtgtaagccttcccacaattcttttactctaaattcgctttaccataagagatacttgtcaaattggggattgaatcattgtccacgccaaatcaggaggtggtgaacttggaatttcctcaattcgataccttaaaaatcgcgtatttcttgaccccacatggtcaacccaatagggtaaggttaaccaacctcgattatccctaattacccactgtctcaccccctgtagataatcttgggagacaagtttgattgatttaatcaactggtcactttctcccaaaaataaacaaccaaaccgccttactagttcaggatggtcaagtgctaactgtatcctctcccttaaacttggttgtattttctccccctcagaacgaacccaaatcaaacacttgagattagacaaaatttcttgataacaaggaataacattctctggatggctaaaatcagcattcttaaaccgtctcatttgacgcaaaattcgcgactttttggggatagataacattgcgatcgccaattctaccccacagtggcgatagacatccgtttcccctaccaaagacaacaacatcccatacactgttgctggaggtgggacagggtaggtttttcccatttcccttgcatgggactcccgaaaagtcgcaaaaggaacatccaaatagagaattaatggcgcagtcattttgattcttctaaccccaaatttcttgtaatgactgttttcaaattttcaatcagttcatttcgatttcgataaatatgcgccttcttaaaaggggaatcatcaaaattatccaattgctgtaaatccttaacaattgttcccccaatccacaattgactaggttcaatctgtccgcattccacttcatctataaattcttgtgtaaattttgcttccttactctgaggatcgcaatattcaaaacaataggaaatatatgaagcaaaattattcgtccattgcaataccaaactatcgggacagaaaggataattaaaaatattactatttcctcctaccttaggaagattcataatcccatctatcacaggtaaaatccgcgagaaatctttgagatgagtggcattaattccaaaataatattgataccgagtggcatgatattctgtaaagtgaagcgatgtgctatccttttctctgccacttttcgcccctaacttgactgcaccatcataaggcgttagcgacacagccatattcatcgctaaagcacccattcgctgatgaggagtgctggtttttgtttgtttcttttttctcttggttgttgaagtctcctcctctatttccgcagactctaataaagcaaacccaaaaatatcatcatcataaaattgttctgggtcaaaatcttcatttgttaatcgattaatatgttcgtcctcatcccaaactcgattcactaaataaccttgcttttgaagataaaagcgtaacgcccaacgaattgcacttgaacctacaaaagaatgaattttaccattccaatagcctttttgcagagtagtcttatttcctcgtctcatgtcatgatttaaggacgctaacccataacgagtgagaactgttccgtaaagataataattggggatattattgtcattcttcttctgactcatcattcatttcttctagctgttgattgtttaaggttaaactatcatccttactaatgggtttttctttgggtttataactggcgatcgctaacaatgcccaaattcttagttcttgccaaggtagttttttaattagtaataaaatttctgcttgattttgatttaaatacttatttaaccctcctcttactaaaaaatcggacaaatattccttaaatgacaattcatcataacaatagtttagctctgcccttaatcgttcaactttcttcttaatgggagggtcttttccgtcctctgctttggcatacattttagcaaaattgcccttcatagcttgctgaaataccttgataaaaatcagataatgcttgtcttcttcactattctctgccattcttatgaatccttcccgattaggaaatatttggttaaataaatattcttttgaatcctctatcaccaatttttcccaaaaattagaccaccaatgaattcctgtcactaaattatcagcaatcagggagcgaatcggattcactttaataaaaatttgcttatattcaatcttctgataattgggttgaaaatatttttgaacctgttgataagtgattaaagtatttttatcaatttcaatttcttctatactcatcaatgttctttgacgagaagcttgattcattttttcatataaccaaacttgacaagcttgatagtagtcgccttcaggctgaatatcgtctaagctgtaataaagtaatcctgcttcaccaaggctactaacatgaagctgtttagtttctaattgctgtaatcgccatcttctttgagaagcatcttcaaaatccttgatttctggaatcaccaccaggtagcgatggggtttcttttccttcaagtcttctgatggaatatgaagtaagcaataatgacaaactactggtacaaataataatgctaaggcgtattcaggtttctcttcgagtttcgtagtgttctgcgtcctagcatggcggacaattccccctaaatacaaccaactggttatttgaacataatcatgtctgagttgttgggtatctgcttcgcataacttctctgcaaaagcttgatgtgcgtaccaagttagggatttgtattgatactcaacttttttttcttcaaccgttagttcagtgttaactatctctcctgcttgataaaacttattaagtcgcagaaaaacagcacatattccttcatgaatatggattttttgacttaaatttattgcatcattgtctaatcctgttaaatgaattaaacctgtatcatctaattgaaaagactccttaattaaccaagatagggcgacaaaatcacttccttgccagaataattcaatagtatcagcagtcaaagaccatgatatatgtcctccgcgttgacgagatgagggatattgcttttctaatcgctttagagtcatgtaaagtcccgccattcccacgcggtgcattattgtcgtatccgcagcatcgagagatagggaaattttgggttgggtagcaaccatgatcaggtttcctcttcttccttgctgcgagttgctgggacaaagattccacacatcatttttcgtttcccactaattccctgttcttgcaaggttaaggaatcttctgggttgagttcgctaattcttacgccaaatcctctaactttaaactgtttcccttgtttattgatggttaattgtcttttttgaggtgttccatcttgtcgggtaagaagttcgatttttccttgtattcctttattatccaatttccgttgcacagcttcaataaagttagtaggttcttgaaagcctgtaattatcactaatctggaatagacactttctgaagaaattaagggtttgtagtctggaatatctaattgataagaattttgacctatgtgaaaagtttgacccgctaaataaggataaattaaaggaatttgttgatgatgaatccgaactttgaggcgagattgagcagtgagttcaagcaaattgttccttgtcggtattccagcaatcggatgaatcccaatattgtctagttcgtgaaggataggacaaatcctggacaatgcgctatagataacataa

SEQ ID NO: 714 - DNA, 4445 bp, synthetic construct
  misc_feature 1..4445: note = Synthetic
  source 1..4445: mol_type = other DNA
cgttacataacttacggtaaatggcccgcctggctgaccgcccaacgacccccgcccattgacgtcaataatgacgtatgttcccatagtaacgccaatagggactttccattgacgtcaatgggtggagtatttacggtaaactgcccacttggcagtacatcaagtgtatcatatgccaagtacgccccctattgacgtcaatgacggtaaatggcccgcctggcattatgcccagtacatgaccttatgggactttcctacttggcagtacatctacgtattagtcatcgctattaccatggtgatgcggttttggcagtacatcaatgggcgtggatagcggtttgactcacggggatttccaagtctccaccccattgacgtcaatgggagtttgttttggcaccaaaatcaacgggactttccaaaatgtcgtaacaactccgccccattgacgcaaatgggcggtaggcgtgtacggtgggaggtctatataagcagagctggtttagtgaaccgtcagatccgctagcgctaccggactcagatcgccaccatgtacccctacgacgtgccagactacgcccctaagaagaagagaaaagtcggcggctctggcggcggaggatctggcggaggtggaagcggaggaacagcccctctgatcctgtacctggatgtgcccttcgccaccttcagagagtctcacgccagagagatgggcaagacataccccgttcctccaccagccacagtgtacggcatgctgctgtctctcgtgggcgagacagacgtgtacagacactgcggagtggaactggccattgccatgctgagcatccccaagaagtcccggatcctgcggcagatgcggagattcaagaacgccgacttctctcaccccgagaacgtgatcccttgctaccaagagatcctgagcaacctgaagtgcctgatctgggtccgaagcgagggcgagaagatccagcctagcctgagagagagaatccagctggccctggatcaccctgaactcgtcagaagattcggctgcctgttcctgggcgagagcgaccagctgatcaagagcatcaagctggtgtcccaggactacctgcagggcgtcagacagtgggtcatcagagacaacagaggctggctgaccctgccttactgggttgaccacgtgggcagcagaaatacccggttcctgagataccggatcgaggaaatccctagcagccctcctcctgacctggcctggacaatgattcagagccccatctgactagcataaccccttggggcgcactcctcaggtgcaggctgcctatcagaaggtggtggctggtgtggccaatgccctggctcacaaataccactgagatctttttccctctgccaaaaattatggggacatcatgaagccccttgagcatctgacttctggctaataaaggaaatttattttcattgcaatagtgtgttggaattttttgtgtctctcactcggaaggacatatgggagggcaaatcatttaaaacatcagaatgagtatttggtttagagtttggcaacatatgcccatatgctggctgccatgaacaaaggttggctataaagaggtcatcagtatatgaaacagccccctgctgtccattccttattccatagaaaagccttgacttgaggttagattttttttatattttgttttgtgttatttttttctttaacatccctaaaattttccttacatgttttactagccagatttttcctcctctcctgactactcccagtcatagctgtccctcttctcttatggagatccctcgacctgcagcccaagcttggcgtaatcatggtcatagctgtttcctgtgtgaaattgttatccgctcacaattccacacaacatacgagccggaagcataaagtgtaaagcctggggtgcctaatgagtgagctaactcacattaattgcgttgcgctcactgcccgctttccagtcgggaaacctgtcgtgccagcggatccgcatctcaattagtcagcaaccatagtcccgcccctaactccgcccatcccgcccctaactccgcccagttccgcccattctccgccccatggctgactaattttttttatttatgcagaggccgaggccgcctcggcctctgagctattccagaagtagtgaggaggcttttttggaggcctaggcttttgcaaaaagctaacttgtttattgcagcttataatggttacaaataaagcaatagcatcacaaatttcacaaataaagcatttttttcactgcattctagttgtggtttgtccaaactcatcaatgtatcttatcatgtctggatccgctgcattaatgaatcggccaacgcgcggggagaggcggtttgcgtattgggcgctcttccgcttcctcgctcactgactcgctgcgctcggtcgttcggctgcggcgagcggtatcagctcactcaaaggcggtaatacggttatccacagaatcaggggataacgcaggaaagaacatgtgagcaaaaggccagcaaaaggccaggaaccgtaaaaaggccgcgttgctggcgtttttccataggctccgcccccctgacgagcatcacaaaaatcgacgctcaagtcagaggtggcgaaacccgacaggactataaagataccaggcgtttccccctggaagctccctcgtgcgctctcctgttccgaccctgccgcttaccggatacctgtccgcctttctcccttcgggaagcgtggcgctttctcatagctcacgctgtaggtatctcagttcggtgtaggtcgttcgctccaagctgggctgtgtgcacgaaccccccgttcagcccgaccgctgcgccttatccggtaactatcgtcttgagtccaacccggtaagacacgacttatcgccactggcagcagccactggtaacaggattagcagagcgaggtatgtaggcggtgctacagagttcttgaagtggtggcctaactacggctacactagaagaacagtatttggtatctgcgctctgctgaagccagttaccttcggaaaaagagttggtagctcttgatccggcaaacaaaccaccgctggtagcggtggtttttttgtttgcaagcagcagattacgcgcagaaaaaaaggatctcaagaagatcctttgatcttttctacggggtctgacgctcagtggaacgaaaactcacgttaagggattttggtcatgagattatcaaaaaggatcttcacctagatccttttaaattaaaaatgaagttttaaatcaatctaaagtatatatgagtaaacttggtctgacagttaccaatgcttaatcagtgaggcacctatctcagcgatctgtctatttcgttcatccatagttgcctgactccccgtcgtgtagataactacgatacgggagggcttaccatctggccccagtgctgcaatgataccgcgagacccacgctcaccggctccagatttatcagcaataaaccagccagccggaagggccgagcgcagaagtggtcctgcaactttatccgcctccatccagtctattaattgttgccgggaagctagagtaagtagttcgccagttaatagtttgcgcaacgttgttgccattgctacaggcatcgtggtgtcacgctcgtcgtttggtatggcttcattcagctccggttcccaacgatcaaggcgagttacatgatcccccatgttgtgcaaaaaagcggttagctccttcggtcctccgatcgttgtcagaagtaagttggccgcagtgttatcactcatggttatggcagcactgcataattctcttactgtcatgccatccgtaagatgcttttctgtgactggtgagtactcaaccaagtcattctgagaatagtgtatgcggcgaccgagttgctcttgcccggcgtcaatacgggataataccgcgccacatagcagaactttaaaagtgctcatcattggaaaacgttcttcggggcgaaaactctcaaggatcttaccgctgttgagatccagttcgatgtaacccactcgtgcacccaactgatcttcagcatcttttactttcaccagcgtttctgggtgagcaaaaacaggaaggcaaaatgccgcaaaaaagggaataagggcgacacggaaatgttgaatactcatactcttcctttttcaatattattgaagcatttatcagggttattgtctcatgagcggatacatatttgaatgtatttagaaaaataaacaaataggggttccgcgcacatttccccgaaaagtgccacctgggtcgacattgattattgactagtaatagtaatcaattacggggtcattagttcatagcccatatatggagttccg

SEQ ID NO: 715 - DNA, 4469 bp, synthetic construct
  misc_feature 1..4469: note = Synthetic
  source 1..4469: mol_type = other DNA
cgttacataacttacggtaaatggcccgcctggctgaccgcccaacgacccccgcccattgacgtcaataatgacgtatgttcccatagtaacgccaatagggactttccattgacgtcaatgggtggagtatttacggtaaactgcccacttggcagtacatcaagtgtatcatatgccaagtacgccccctattgacgtcaatgacggtaaatggcccgcctggcattatgcccagtacatgaccttatgggactttcctacttggcagtacatctacgtattagtcatcgctattaccatggtgatgcggttttggcagtacatcaatgggcgtggatagcggtttgactcacggggatttccaagtctccaccccattgacgtcaatgggagtttgttttggcaccaaaatcaacgggactttccaaaatgtcgtaacaactccgccccattgacgcaaatgggcggtaggcgtgtacggtgggaggtctatataagcagagctggtttagtgaaccgtcagatccgctagcgctaccggactcagatcgccaccatgtacccctacgacgtgccagactacgcccctaagaagaagagaaaagtcggcggctctggcggcggaggatctggcggaggtggaagcggaggagccgctctgctgatccagagcgaggaatacgtggacctgaccttcaagctgagaggcgcccctattcctctggacaacggctacgtgatctacagcgccctgagcagaatctgccccatcctgcacgagctggacaacatcggcattcaccctatcgccggcattcccaccagaaacaacctgctggaactgacagcccagagccggctgaaagtgcggattcaccaccagcagatccctctgatctacccctatctggccggacagaccttccacatcggccagaatagctaccagctggacatccccgactacaagcccctgatcagcagcgagagcgtgtacagcagactggtcatcatcaccggcttccaagagcctaccaacttcatcgaggccgtgcagcggaagctggataacaagggcatccagggcaagatcgagctgctgaccagacaggatggcacccctcagaagagacagctgaccatcaacaagcagggcaagcagttcaaagtgcgcggctttggcgtgcggatcagcgagctgaatcctgaggatagcctgacactgcaagagcagggcatctccggcaagcggaagatgatgtgcggcatcttcgtgcccgccaccagatccaaagaggaagaggaaacctgactagcataaccccttggggcgcactcctcaggtgcaggctgcctatcagaaggtggtggctggtgtggccaatgccctggctcacaaataccactgagatctttttccctctgccaaaaattatggggacatcatgaagccccttgagcatctgacttctggctaataaaggaaatttattttcattgcaatagtgtgttggaattttttgtgtctctcactcggaaggacatatgggagggcaaatcatttaaaacatcagaatgagtatttggtttagagtttggcaacatatgcccatatgctggctgccatgaacaaaggttggctataaagaggtcatcagtatatgaaacagccccctgctgtccattccttattccatagaaaagccttgacttgaggttagattttttttatattttgttttgtgttatttttttctttaacatccctaaaattttccttacatgttttactagccagatttttcctcctctcctgactactcccagtcatagctgtccctcttctcttatggagatccctcgacctgcagcccaagcttggcgtaatcatggtcatagctgtttcctgtgtgaaattgttatccgctcacaattccacacaacatacgagccggaagcataaagtgtaaagcctggggtgcctaatgagtgagctaactcacattaattgcgttgcgctcactgcccgctttccagtcgggaaacctgtcgtgccagcggatccgcatctcaattagtcagcaaccatagtcccgcccctaactccgcccatcccgcccctaactccgcccagttccgcccattctccgccccatggctgactaattttttttatttatgcagaggccgaggccgcctcggcctctgagctattccagaagtagtgaggaggcttttttggaggcctaggcttttgcaaaaagctaacttgtttattgcagcttataatggttacaaataaagcaatagcatcacaaatttcacaaataaagcatttttttcactgcattctagttgtggtttgtccaaactcatcaatgtatcttatcatgtctggatccgctgcattaatgaatcggccaacgcgcggggagaggcggtttgcgtattgggcgctcttccgcttcctcgctcactgactcgctgcgctcggtcgttcggctgcggcgagcggtatcagctcactcaaaggcggtaatacggttatccacagaatcaggggataacgcaggaaagaacatgtgagcaaaaggccagcaaaaggccaggaaccgtaaaaaggccgcgttgctggcgtttttccataggctccgcccccctgacgagcatcacaaaaatcgacgctcaagtcagaggtggcgaaacccgacaggactataaagataccaggcgtttccccctggaagctccctcgtgcgctctcctgttccgaccctgccgcttaccggatacctgtccgcctttctcccttcgggaagcgtggcgctttctcatagctcacgctgtaggtatctcagttcggtgtaggtcgttcgctccaagctgggctgtgtgcacgaaccccccgttcagcccgaccgctgcgccttatccggtaactatcgtcttgagtccaacccggtaagacacgacttatcgccactggcagcagccactggtaacaggattagcagagcgaggtatgtaggcggtgctacagagttcttgaagtggtggcctaactacggctacactagaagaacagtatttggtatctgcgctctgctgaagccagttaccttcggaaaaagagttggtagctcttgatccggcaaacaaaccaccgctggtagcggtggtttttttgtttgcaagcagcagattacgcgcagaaaaaaaggatctcaagaagatcctttgatcttttctacggggtctgacgctcagtggaacgaaaactcacgttaagggattttggtcatgagattatcaaaaaggatcttcacctagatccttttaaattaaaaatgaagttttaaatcaatctaaagtatatatgagtaaacttggtctgacagttaccaatgcttaatcagtgaggcacctatctcagcgatctgtctatttcgttcatccatagttgcctgactccccgtcgtgtagataactacgatacgggagggcttaccatctggccccagtgctgcaatgataccgcgagacccacgctcaccggctccagatttatcagcaataaaccagccagccggaagggccgagcgcagaagtggtcctgcaactttatccgcctccatccagtctattaattgttgccgggaagctagagtaagtagttcgccagttaatagtttgcgcaacgttgttgccattgctacaggcatcgtggtgtcacgctcgtcgtttggtatggcttcattcagctccggttcccaacgatcaaggcgagttacatgatcccccatgttgtgcaaaaaagcggttagctccttcggtcctccgatcgttgtcagaagtaagttggccgcagtgttatcactcatggttatggcagcactgcataattctcttactgtcatgccatccgtaagatgcttttctgtgactggtgagtactcaaccaagtcattctgagaatagtgtatgcggcgaccgagttgctcttgcccggcgtcaatacgggataataccgcgccacatagcagaactttaaaagtgctcatcattggaaaacgttcttcggggcgaaaactctcaaggatcttaccgctgttgagatccagttcgatgtaacccactcgtgcacccaactgatcttcagcatcttttactttcaccagcgtttctgggtgagcaaaaacaggaaggcaaaatgccgcaaaaaagggaataagggcgacacggaaatgttgaatactcatactcttcctttttcaatattattgaagcatttatcagggttattgtctcatgagcggatacatatttgaatgtatttagaaaaataaacaaataggggttccgcgcacatttccccgaaaagtgccacctgggtcgacattgattattgactagtaatagtaatcaattacggggtcattagttcatagcccatatatggagttccg

SEQ ID NO: 716 - DNA, 4775 bp, synthetic construct
  misc_feature 1..4775: note = Synthetic
  source 1..4775: mol_type = other DNA
cgttacataacttacggtaaatggcccgcctggctgaccgcccaacgacccccgcccattgacgtcaataatgacgtatgttcccatagtaacgccaatagggactttccattgacgtcaatgggtggagtatttacggtaaactgcccacttggcagtacatcaagtgtatcatatgccaagtacgccccctattgacgtcaatgacggtaaatggcccgcctggcattatgcccagtacatgaccttatgggactttcctacttggcagtacatctacgtattagtcatcgctattaccatggtgatgcggttttggcagtacatcaatgggcgtggatagcggtttgactcacggggatttccaagtctccaccccattgacgtcaatgggagtttgttttggcaccaaaatcaacgggactttccaaaatgtcgtaacaactccgccccattgacgcaaatgggcggtaggcgtgtacggtgggaggtctatataagcagagctggtttagtgaaccgtcagatccgctagcgctaccggactcagatcgccaccatgtacccctacgacgtgccagactacgcccctaagaagaagagaaaagtcggcggctctggcggcggaggatctggcggaggtggaagcggaggaatgagccagaagaagaacgacaacaacatccccaactactacctgtacggcaccgtgctgaccagatacggactggccagcctgaaccacgacatgcggagaggcaacaagaccacactgcagaaaggctactggaacggcaagatccacagcttcgtgggcagcagcgccattagatgggccctgaggttctatctgcagaaacagggctacctggtcaacagagtgtgggacgaagatgagcacatcaaccggctgaccaacgaggacttcgaccccgagcagttctacgacgacgacatcttcggcttcgccctgctggaaagcgccgagatcgaggaagagacaagcaccaccaagcggaagaagaagcagaccaagaccagcacaccccaccagagaatgggagccctggccatgaatatggccgtgtctctgaccccttacgatggcgccgtgaagctgggagccaagtctggcagagagaaggacagcaccagcctgcacttcaccgagtaccacgccaccagataccagtactacttcggcatcaacgccacacacctgaaggacttcagccggatcctgcctgtgatcgacggcatcatgaacctgcctaaagtcggcggcaacagcaatatcttcaactaccctttctgccccgacagcctggtgctgcagtggaccaacaatttcgccagctacatcagctactgcttcgagtactgcgaccctcagagcaaagaggccaagttcacccaagagttcatcgacgaggtggaatgcggccagatcgagccttctcagctctggatcggcggcaccatcgtgaaggatctgcagcagctggacaacttcgacgacagccccttcaagaaggcccacatctaccggaaccggaacgagctgatcgagaacctgaaaaccgtgatcacccggaacctgggcctcgaggaatccaagtgactagcataaccccttggggcgcactcctcaggtgcaggctgcctatcagaaggtggtggctggtgtggccaatgccctggctcacaaataccactgagatctttttccctctgccaaaaattatggggacatcatgaagccccttgagcatctgacttctggctaataaaggaaatttattttcattgcaatagtgtgttggaattttttgtgtctctcactcggaaggacatatgggagggcaaatcatttaaaacatcagaatgagtatttggtttagagtttggcaacatatgcccatatgctggctgccatgaacaaaggttggctataaagaggtcatcagtatatgaaacagccccctgctgtccattccttattccatagaaaagccttgacttgaggttagattttttttatattttgttttgtgttatttttttctttaacatccctaaaattttccttacatgttttactagccagatttttcctcctctcctgactactcccagtcatagctgtccctcttctcttatggagatccctcgacctgcagcccaagcttggcgtaatcatggtcatagctgtttcctgtgtgaaattgttatccgctcacaattccacacaacatacgagccggaagcataaagtgtaaagcctggggtgcctaatgagtgagctaactcacattaattgcgttgcgctcactgcccgctttccagtcgggaaacctgtcgtgccagcggatccgcatctcaattagtcagcaaccatagtcccgcccctaactccgcccatcccgcccctaactccgcccagttccgcccattctccgccccatggctgactaattttttttatttatgcagaggccgaggccgcctcggcctctgagctattccagaagtagtgaggaggcttttttggaggcctaggcttttgcaaaaagctaacttgtttattgcagcttataatggttacaaataaagcaatagcatcacaaatttcacaaataaagcatttttttcactgcattctagttgtggtttgtccaaactcatcaatgtatcttatcatgtctggatccgctgcattaatgaatcggccaacgcgcggggagaggcggtttgcgtattgggcgctcttccgcttcctcgctcactgactcgctgcgctcggtcgttcggctgcggcgagcggtatcagctcactcaaaggcggtaatacggttatccacagaatcaggggataacgcaggaaagaacatgtgagcaaaaggccagcaaaaggccaggaaccgtaaaaaggccgcgttgctggcgtttttccataggctccgcccccctgacgagcatcacaaaaatcgacgctcaagtcagaggtggcgaaacccgacaggactataaagataccaggcgtttccccctggaagctccctcgtgcgctctcctgttccgaccctgccgcttaccggatacctgtccgcctttctcccttcgggaagcgtggcgctttctcatagctcacgctgtaggtatctcagttcggtgtaggtcgttcgctccaagctgggctgtgtgcacgaaccccccgttcagcccgaccgctgcgccttatccggtaactatcgtcttgagtccaacccggtaagacacgacttatcgccactggcagcagccactggtaacaggattagcagagcgaggtatgtaggcggtgctacagagttcttgaagtggtggcctaactacggctacactagaagaacagtatttggtatctgcgctctgctgaagccagttaccttcggaaaaagagttggtagctcttgatccggcaaacaaaccaccgctggtagcggtggtttttttgtttgcaagcagcagattacgcgcagaaaaaaaggatctcaagaagatcctttgatcttttctacggggtctgacgctcagtggaacgaaaactcacgttaagggattttggtcatgagattatcaaaaaggatcttcacctagatccttttaaattaaaaatgaagttttaaatcaatctaaagtatatatgagtaaacttggtctgacagttaccaatgcttaatcagtgaggcacctatctcagcgatctgtctatttcgttcatccatagttgcctgactccccgtcgtgtagataactacgatacgggagggcttaccatctggccccagtgctgcaatgataccgcgagacccacgctcaccggctccagatttatcagcaataaaccagccagccggaagggccgagcgcagaagtggtcctgcaactttatccgcctccatccagtctattaattgttgccgggaagctagagtaagtagttcgccagttaatagtttgcgcaacgttgttgccattgctacaggcatcgtggtgtcacgctcgtcgtttggtatggcttcattcagctccggttcccaacgatcaaggcgagttacatgatcccccatgttgtgcaaaaaagcggttagctccttcggtcctccgatcgttgtcagaagtaagttggccgcagtgttatcactcatggttatggcagcactgcataattctcttactgtcatgccatccgtaagatgcttttctgtgactggtgagtactcaaccaagtcattctgagaatagtgtatgcggcgaccgagttgctcttgcccggcgtcaatacgggataataccgcgccacatagcagaactttaaaagtgctcatcattggaaaacgttcttcggggcgaaaactctcaaggatcttaccgctgttgagatccagttcgatgtaacccactcgtgcacccaactgatcttcagcatcttttactttcaccagcgtttctgggtgagcaaaaacaggaaggcaaaatgccgcaaaaaagggaataagggcgacacggaaatgttgaatactcatactcttcctttttcaatattattgaagcatttatcagggttattgtctcatgagcggatacatatttgaatgtatttagaaaaataaacaaataggggttccgcgcacatttccccgaaaagtgccacctgggtcgacattgattattgactagtaatagtaatcaattacggggtcattagttcatagcccatatatggagttccg

SEQ ID NO: 717 - DNA, 5384 bp, synthetic construct
  misc_feature 1..5384: note = Synthetic
  source 1..5384: mol_type = other DNA
cgttacataacttacggtaaatggcccgcctggctgaccgcccaacgacccccgcccattgacgtcaataatgacgtatgttcccatagtaacgccaatagggactttccattgacgtcaatgggtggagtatttacggtaaactgcccacttggcagtacatcaagtgtatcatatgccaagtacgccccctattgacgtcaatgacggtaaatggcccgcctggcattatgcccagtacatgaccttatgggactttcctacttggcagtacatctacgtattagtcatcgctattaccatggtgatgcggttttggcagtacatcaatgggcgtggatagcggtttgactcacggggatttccaagtctccaccccattgacgtcaatgggagtttgttttggcaccaaaatcaacgggactttccaaaatgtcgtaacaactccgccccattgacgcaaatgggcggtaggcgtgtacggtgggaggtctatataagcagagctggtttagtgaaccgtcagatccgctagcgctaccggactcagatcgccaccatgtacccctacgacgtgccagactacgcccctaagaagaagagaaaagtcggcggctctggcggcggaggatctggcggaggtggaagcggaggagtggccacacagcccaagatcagcctgtctctggatgccgccgacaccaccatcatgcacagagttggaatggccggcctgtacatgaccctgaagcggctggaaaagcagtaccccagcagcagacagagaggcggccacatttcttggagcctgaccgccgataccatcgagctgttttggcagggcagcgactttgtggccctgagctggctgatcaaagagagctttcagctggacgacaccggcctgatccacctgacaggcctggacaacgacgccatcaacctgagccagaagatccacatccacgagggaatctgcgccgtgttcctgcggctgaacaagttttaccaggccggcgagatcgtgaacaccgagctgacagtggaagagaagaaggtggaataccagtacaagagcctgacttggtacgcccaccaggcctttgccgagaagctgtgcgaagccgatacacagcagctgcggcacgactacgtgcagatcacaagctggctgtacctcggcggaattgtgcggcatgccagaacacagaacaccaccaagctggaagaaaagcccgagtacgccctggctctgctgtttgtgcctgtcgtgtgccactactgcctgctgcacatccctagcgaggacctgaaagagaaaaagccccacagatacctggtggtcatccccgagatcaaggacttcgaggatgccagccagagaagatggcggctgcagcagctggaaacaaagcagctgcacgtgtccagcctgggagaagccggcctgctgtactacagcctggacgatattcagcccgagggcgactactaccaggcctgccaagtttggctgtacgagaagatgaaccaggccagccggcagagaaccctgatgagcatcgaggaaatcgagatcgacaagaacaccctgatcacctaccagcaggtccagaagtactttcagcccaactatcagaagatcgagtacaagcagatcttcatcaaagtgaaccccattcggtccctgatcgccgacaatctggtcaccggaatccactggtggtccaacttttgggagaaactggtcatcgaggacagcaaagagtacctgttcaaccagatcttccccaaccgcgagggcttcatcagaatggccgagaacagcgaagaggacaagcactacctgatctttatcaaggtgttccagcaggccatgaagggcaacttcgccaagatgtacgccaaggccgaggacggcaaggaccctcctatcaagaaaaaagtggaacggctgcgggccgagctgaactactgttacgatgagctgagcttcaaagagtatctgagcgacttcctcgtcagaggtggcctgaacaaatacctgaaccagaatcaggccgagatcctgctgctgatcaagaagctgccctggcaagagctgagaatctgggccctgctggccattgccagctacaagcccaaagagaagcccatcagcaaggacgacagcctgacactgaacaaccagcagctcgaagagatgaacgacgagagcgaggaagagtgactagcataaccccttggggcgcactcctcaggtgcaggctgcctatcagaaggtggtggctggtgtggccaatgccctggctcacaaataccactgagatctttttccctctgccaaaaattatggggacatcatgaagccccttgagcatctgacttctggctaataaaggaaatttattttcattgcaatagtgtgttggaattttttgtgtctctcactcggaaggacatatgggagggcaaatcatttaaaacatcagaatgagtatttggtttagagtttggcaacatatgcccatatgctggctgccatgaacaaaggttggctataaagaggtcatcagtatatgaaacagccccctgctgtccattccttattccatagaaaagccttgacttgaggttagattttttttatattttgttttgtgttatttttttctttaacatccctaaaattttccttacatgttttactagccagatttttcctcctctcctgactactcccagtcatagctgtccctcttctcttatggagatccctcgacctgcagcccaagcttggcgtaatcatggtcatagctgtttcctgtgtgaaattgttatccgctcacaattccacacaacatacgagccggaagcataaagtgtaaagcctggggtgcctaatgagtgagctaactcacattaattgcgttgcgctcactgcccgctttccagtcgggaaacctgtcgtgccagcggatccgcatctcaattagtcagcaaccatagtcccgcccctaactccgcccatcccgcccctaactccgcccagttccgcccattctccgccccatggctgactaattttttttatttatgcagaggccgaggccgcctcggcctctgagctattccagaagtagtgaggaggcttttttggaggcctaggcttttgcaaaaagctaacttgtttattgcagcttataatggttacaaataaagcaatagcatcacaaatttcacaaataaagcatttttttcactgcattctagttgtggtttgtccaaactcatcaatgtatcttatcatgtctggatccgctgcattaatgaatcggccaacgcgcggggagaggcggtttgcgtattgggcgctcttccgcttcctcgctcactgactcgctgcgctcggtcgttcggctgcggcgagcggtatcagctcactcaaaggcggtaatacggttatccacagaatcaggggataacgcaggaaagaacatgtgagcaaaaggccagcaaaaggccaggaaccgtaaaaaggccgcgttgctggcgtttttccataggctccgcccccctgacgagcatcacaaaaatcgacgctcaagtcagaggtggcgaaacccgacaggactataaagataccaggcgtttccccctggaagctccctcgtgcgctctcctgttccgaccctgccgcttaccggatacctgtccgcctttctcccttcgggaagcgtggcgctttctcatagctcacgctgtaggtatctcagttcggtgtaggtcgttcgctccaagctgggctgtgtgcacgaaccccccgttcagcccgaccgctgcgccttatccggtaactatcgtcttgagtccaacccggtaagacacgacttatcgccactggcagcagccactggtaacaggattagcagagcgaggtatgtaggcggtgctacagagttcttgaagtggtggcctaactacggctacactagaagaacagtatttggtatctgcgctctgctgaagccagttaccttcggaaaaagagttggtagctcttgatccggcaaacaaaccaccgctggtagcggtggtttttttgtttgcaagcagcagattacgcgcagaaaaaaaggatctcaagaagatcctttgatcttttctacggggtctgacgctcagtggaacgaaaactcacgttaagggattttggtcatgagattatcaaaaaggatcttcacctagatccttttaaattaaaaatgaagttttaaatcaatctaaagtatatatgagtaaacttggtctgacagttaccaatgcttaatcagtgaggcacctatctcagcgatctgtctatttcgttcatccatagttgcctgactccccgtcgtgtagataactacgatacgggagggcttaccatctggccccagtgctgcaatgataccgcgagacccacgctcaccggctccagatttatcagcaataaaccagccagccggaagggccgagcgcagaagtggtcctgcaactttatccgcctccatccagtctattaattgttgccgggaagctagagtaagtagttcgccagttaatagtttgcgcaacgttgttgccattgctacaggcatcgtggtgtcacgctcgtcgtttggtatggcttcattcagctccggttcccaacgatcaaggcgagttacatgatcccccatgttgtgcaaaaaagcggttagctccttcggtcctccgatcgttgtcagaagtaagttggccgcagtgttatcactcatggttatggcagcactgcataattctcttactgtcatgccatccgtaagatgcttttctgtgactggtgagtactcaaccaagtcattctgagaatagtgtatgcggcgaccgagttgctcttgcccggcgtcaatacgggataataccgcgccacatagcagaactttaaaagtgctcatcattggaaaacgttcttcggggcgaaaactctcaaggatcttaccgctgttgagatccagttcgatgtaacccactcgtgcacccaactgatcttcagcatcttttactttcaccagcgtttctgggtgagcaaaaacaggaaggcaaaatgccgcaaaaaagggaataagggcgacacggaaatgttgaatactcatactcttcctttttcaatattattgaagcatttatcagggttattgtctcatgagcggatacatatttgaatgtatttagaaaaataaacaaataggggttccgcgcacatttccccgaaaagtgccacctgggtcgacattgattattgactagtaatagtaatcaattacggggtcattagttcatagcccatatatggagttccg

SEQ ID NO: 718 - DNA, 4814 bp, synthetic construct
  misc_feature 1..4814: note = Synthetic
  source 1..4814: mol_type = other DNA
cgttacataacttacggtaaatggcccgcctggctgaccgcccaacgacccccgcccattgacgtcaataatgacgtatgttcccatagtaacgccaatagggactttccattgacgtcaatgggtggagtatttacggtaaactgcccacttggcagtacatcaagtgtatcatatgccaagtacgccccctattgacgtcaatgacggtaaatggcccgcctggcattatgcccagtacatgaccttatgggactttcctacttggcagtacatctacgtattagtcatcgctattaccatggtgatgcggttttggcagtacatcaatgggcgtggatagcggtttgactcacggggatttccaagtctccaccccattgacgtcaatgggagtttgttttggcaccaaaatcaacgggactttccaaaatgtcgtaacaactccgccccattgacgcaaatgggcggtaggcgtgtacggtgggaggtctatataagcagagctggtttagtgaaccgtcagatccgctagcgctaccggactcagatcgccaccatgtacccctacgacgtgccagactacgcccctaagaagaagagaaaagtcggcggctctggcggcggaggatctggcggaggtggaagcggaggagtcaaccccagaggcatgaccatctacctggaacactggaacctgaagcctctggaaatccctcagcggagccggctgtttagcctggaaccagtggctgtgggcacaccttatgccgagagcctgagcagctacctgcacagactggcccaggctcactgtctgaccagccagaaactggtcatgggcgagatcgcccctctgatcctgaaggacgaggacaagagcgagctgctgagcaagaacctgagccatctgctgggcaacagcgacgccaagcctaccatcaacggcatgagagagatgaccggcaagctggtcaccatcctggaagaactgaccatgcggcaggacctgcggtttctgacactgctgtcttggaagggcatgatctacgacaagggcctgttccgcaactacagagcctggtgtccttgctgctgggaagagtggatgcgcgagaacaagacaatctacgagcccctgctgtggtccttcaaggacgtggaattctgcgtgatccacaagcagcggctgatcgaggaatgccctcactgtggcagcagactgcccatcatggccaagtttagccctgccggcttctgcagcagatgctatggatggctgggccaagaagtgaagggcgaagaggaaatcgagaagtaccgcgtgaacatccagggcatctccgagctgattgccctgacacctcagctgggctacgagcctattcctatcgagctgacccggaaactgcagctgatcctgctggtgttcgagcaggccatcggcaaggatctgaacctgctgggcgatctgggcagaatcatggaaagcctgcggatcgccagcaagaccaaccagaaccagccttaccacctggtcaagctgatcatccccgtgtgcgagaaggccaagatcagcgtgtcccagctgttcggcctggactttcaagagctgggcaagatcctgttcggcaatttctccctggaactgaaactgtgactagcataaccccttggggcgcactcctcaggtgcaggctgcctatcagaaggtggtggctggtgtggccaatgccctggctcacaaataccactgagatctttttccctctgccaaaaattatggggacatcatgaagccccttgagcatctgacttctggctaataaaggaaatttattttcattgcaatagtgtgttggaattttttgtgtctctcactcggaaggacatatgggagggcaaatcatttaaaacatcagaatgagtatttggtttagagtttggcaacatatgcccatatgctggctgccatgaacaaaggttggctataaagaggtcatcagtatatgaaacagccccctgctgtccattccttattccatagaaaagccttgacttgaggttagattttttttatattttgttttgtgttatttttttctttaacatccctaaaattttccttacatgttttactagccagatttttcctcctctcctgactactcccagtcatagctgtccctcttctcttatggagatccctcgacctgcagcccaagcttggcgtaatcatggtcatagctgtttcctgtgtgaaattgttatccgctcacaattccacacaacatacgagccggaagcataaagtgtaaagcctggggtgcctaatgagtgagctaactcacattaattgcgttgcgctcactgcccgctttccagtcgggaaacctgtcgtgccagcggatccgcatctcaattagtcagcaaccatagtcccgcccctaactccgcccatcccgcccctaactccgcccagttccgcccattctccgccccatggctgactaattttttttatttatgcagaggccgaggccgcctcggcctctgagctattccagaagtagtgaggaggcttttttggaggcctaggcttttgcaaaaagctaacttgtttattgcagcttataatggttacaaataaagcaatagcatcacaaatttcacaaataaagcatttttttcactgcattctagttgtggtttgtccaaactcatcaatgtatcttatcatgtctggatccgctgcattaatgaatcggccaacgcgcggggagaggcggtttgcgtattgggcgctcttccgcttcctcgctcactgactcgctgcgctcggtcgttcggctgcggcgagcggtatcagctcactcaaaggcggtaatacggttatccacagaatcaggggataacgcaggaaagaacatgtgagcaaaaggccagcaaaaggccaggaaccgtaaaaaggccgcgttgctggcgtttttccataggctccgcccccctgacgagcatcacaaaaatcgacgctcaagtcagaggtggcgaaacccgacaggactataaagataccaggcgtttccccctggaagctccctcgtgcgctctcctgttccgaccctgccgcttaccggatacctgtccgcctttctcccttcgggaagcgtggcgctttctcatagctcacgctgtaggtatctcagttcggtgtaggtcgttcgctccaagctgggctgtgtgcacgaaccccccgttcagcccgaccgctgcgccttatccggtaactatcgtcttgagtccaacccggtaagacacgacttatcgccactggcagcagccactggtaacaggattagcagagcgaggtatgtaggcggtgctacagagttcttgaagtggtggcctaactacggctacactagaagaacagtatttggtatctgcgctctgctgaagccagttaccttcggaaaaagagttggtagctcttgatccggcaaacaaaccaccgctggtagcggtggtttttttgtttgcaagcagcagattacgcgcagaaaaaaaggatctcaagaagatcctttgatcttttctacggggtctgacgctcagtggaacgaaaactcacgttaagggattttggtcatgagattatcaaaaaggatcttcacctagatccttttaaattaaaaatgaagttttaaatcaatctaaagtatatatgagtaaacttggtctgacagttaccaatgcttaatcagtgaggcacctatctcagcgatctgtctatttcgttcatccatagttgcctgactccccgtcgtgtagataactacgatacgggagggcttaccatctggccccagtgctgcaatgataccgcgagacccacgctcaccggctccagatttatcagcaataaaccagccagccggaagggccgagcgcagaagtggtcctgcaactttatccgcctccatccagtctattaattgttgccgggaagctagagtaagtagttcgccagttaatagtttgcgcaacgttgttgccattgctacaggcatcgtggtgtcacgctcgtcgtttggtatggcttcattcagctccggttcccaacgatcaaggcgagttacatgatcccccatgttgtgcaaaaaagcggttagctccttcggtcctccgatcgttgtcagaagtaagttggccgcagtgttatcactcatggttatggcagcactgcataattctcttactgtcatgccatccgtaagatgcttttctgtgactggtgagtactcaaccaagtcattctgagaatagtgtatgcggcgaccgagttgctcttgcccggcgtcaatacgggataataccgcgccacatagcagaactttaaaagtgctcatcattggaaaacgttcttcggggcgaaaactctcaaggatcttaccgctgttgagatccagttcgatgtaacccactcgtgcacccaactgatcttcagcatcttttactttcaccagcgtttctgggtgagcaaaaacaggaaggcaaaatgccgcaaaaaagggaataagggcgacacggaaatgttgaatactcatactcttcctttttcaatattattgaagcatttatcagggttattgtctcatgagcggatacatatttgaatgtatttagaaaaataaacaaataggggttccgcgcacatttccccgaaaagtgccacctgggtcgacattgattattgactagtaatagtaatcaattacggggtcattagttcatagcccatatatggagttccg

SEQ ID NO: 719 - DNA, 6509 bp, synthetic construct
  misc_feature 1..6509: note = Synthetic
  source 1..6509: mol_type = other DNA
cgttacataacttacggtaaatggcccgcctggctgaccgcccaacgacccccgcccattgacgtcaataatgacgtatgttcccatagtaacgccaatagggactttccattgacgtcaatgggtggagtatttacggtaaactgcccacttggcagtacatcaagtgtatcatatgccaagtacgccccctattgacgtcaatgacggtaaatggcccgcctggcattatgcccagtacatgaccttatgggactttcctacttggcagtacatctacgtattagtcatcgctattaccatggtgatgcggttttggcagtacatcaatgggcgtggatagcggtttgactcacggggatttccaagtctccaccccattgacgtcaatgggagtttgttttggcaccaaaatcaacgggactttccaaaatgtcgtaacaactccgccccattgacgcaaatgggcggtaggcgtgtacggtgggaggtctatataagcagagctggtttagtgaaccgtcagatccgctagcgctaccggactcagatcgccaccatgtacccctacgacgtgccagactacgcccctaagaagaagagaaaagtcggcggctctggcggcggaggatctggcggaggtggaagcggaggaaaggaacagttcgagcagtgggtcgcccggctgcagatttctgaagccggccagaaaatcatcgagaaagtgcggagcagcgagcccagcagaagagttggcggcggaagcaaaaatgtggccggcagataccccagccggaagatgggagtgaccatccagttcgagagccacagagtggaactgcccgtgatctaccagctggaacacgacgaggacgtgctggaattctacgaccagcctcctcagatcaagctggactaccaggccagcaatggcagacgactgggagtgctgcacacccctgatctgttcgtgatcaggaccaatagcgccggctgggaagagtgcaagaccgagcaggatctgaagaagctggcccagaagaaccccaaccggtacttctacagccaagaggacaaccagtggcactgccctccaggcgaagtgtacgccgatcagttcggcctgtactaccggatcagaagcgacaaagaaatcaactgggtgctgcagcggaacctgcagttcctggaagattactaccgcagcgagagcctgggcgtcgaacaggctattgctcagtctctgctggccatcgtgtctagccagcctggaattacactggccgagctgctgcatcagcagacaggcgccaagagcgacgacatctacaccctgatcgtgcaagagcagatctacttcgacctgaacgccgctcctctggctgagcctgagagatgcctgatcttcagggatgagcagaccgccagcgcctacagactgatggtggaacagcccaacgtgtccctgcctgccatctctcccgtgatcaatatcgccaccggcacacccgtgtcctgggatggaaagggcctgaacatcatcctcgtgggcgagacagaagtgatcctgggcgccgagaatgaccagctgatcaagttcaagaaaaacgtgttcgaggaactcgtgcggcagggcgagatcacatctctgcagaccccagagaaaaccgacatcagcaccgagagctggcagcggttttaccaggcctctccagaggatcaggccgaggctctggaacggtacaagaccatcgagccctacctgaacggacaccctcctgagaacgagacaatccccgccagaaccatcagagactggaaggccaagtacctgacagccctgcagaagtacggctgcggctatatcggcctgctgtcccacagaagcgtgaagggcaacagacagagaaagctgcccgaggacaccctggccatcatggaaagattcattctcgaggactacgagacactgaagcagaaacggatgctggaagtgtatggcgccctggtgctggcttgtgaacagagcagtgtgatcgcccctagctacaaggccttcaccaaagaagtgaagcggcggaccggctacgagcagaccaagaagagacaaggcagaagggccgcctaccagtacgagagcttttactgggagctgacccagaaaacaccccggcacggcgatagacctttcgagatcggacacatcgatcacacccagctggacgtggaacttgtgtgctccagaaccggcagaaacctgggcagaccttgggccacctttctggtggatgcctactctagaaggctgctggccgtgtacctgaccttcgacagcccaagctaccggtcctgtctgatggtgctgcggatctgcgtgaagaggcatggcagactgcctcagatcgtggtggtggacaatggcaccgagttccacagcgtgtacttcgaaaccctgctggctaccttcgagtgcaccaagaagcagcggcctccagccaaggccagatttggcagcgtgtgcgagagactgttcggcaccagcaacacccagttcgtgcacaacctgctgggcaatacccagatcacccggaacgtgcggcaagtgaccaagagcgtgaaccccaagaatcaggccgtgtggacactgggactgctgtacgagtatctgtgcgcctgggcctacgaggtgtacgacacagatgaacaccccgctctgtttcagagccccagggatgcttttgccgccggaatggtcacaagcggcagcagactgcaccggatgatcccttacgacgagaacttccagatcctgacactgcccaccaccagcgagggcaaagccaaggtgcaagttggcagaggcgtgaagatcaacagcatctactactggtccaacagcttcagggacccacagatcgagaacaccagcgtgcccaccagatacgaccccttcaacatcggaatcgcctacgccttcgtcagaggccagtgggtgcagtgcatcagccagtactacagccagctgcagggcagatccgagaaagagctgaagctggctagcgccgagctgagaaagagaagcagcaactacggcagacagagccaggtgtccgccaagaacctggccgaatttctggccagcgtcgaggcccaagagacactgctggaacagagaagctacgacgccgaggccagagaagtgttcatcgtgatcgaaggcggcaaggccgccaccagcagaaatgagcagcctaagctgatccaggtgccgtttgagaacaccgacacacaggtggccgaggacgaggccattacacctgaaacactggtggtgtacgaggaattcagcctgtgactagcataaccccttggggcgcactcctcaggtgcaggctgcctatcagaaggtggtggctggtgtggccaatgccctggctcacaaataccactgagatctttttccctctgccaaaaattatggggacatcatgaagccccttgagcatctgacttctggctaataaaggaaatttattttcattgcaatagtgtgttggaattttttgtgtctctcactcggaaggacatatgggagggcaaatcatttaaaacatcagaatgagtatttggtttagagtttggcaacatatgcccatatgctggctgccatgaacaaaggttggctataaagaggtcatcagtatatgaaacagccccctgctgtccattccttattccatagaaaagccttgacttgaggttagattttttttatattttgttttgtgttatttttttctttaacatccctaaaattttccttacatgttttactagccagatttttcctcctctcctgactactcccagtcatagctgtccctcttctcttatggagatccctcgacctgcagcccaagcttggcgtaatcatggtcatagctgtttcctgtgtgaaattgttatccgctcacaattccacacaacatacgagccggaagcataaagtgtaaagcctggggtgcctaatgagtgagctaactcacattaattgcgttgcgctcactgcccgctttccagtcgggaaacctgtcgtgccagcggatccgcatctcaattagtcagcaaccatagtcccgcccctaactccgcccatcccgcccctaactccgcccagttccgcccattctccgccccatggctgactaattttttttatttatgcagaggccgaggccgcctcggcctctgagctattccagaagtagtgaggaggcttttttggaggcctaggcttttgcaaaaagctaacttgtttattgcagcttataatggttacaaataaagcaatagcatcacaaatttcacaaataaagcatttttttcactgcattctagttgtggtttgtccaaactcatcaatgtatcttatcatgtctggatccgctgcattaatgaatcggccaacgcgcggggagaggcggtttgcgtattgggcgctcttccgcttcctcgctcactgactcgctgcgctcggtcgttcggctgcggcgagcggtatcagctcactcaaaggcggtaatacggttatccacagaatcaggggataacgcaggaaagaacatgtgagcaaaaggccagcaaaaggccaggaaccgtaaaaaggccgcgttgctggcgtttttccataggctccgcccccctgacgagcatcacaaaaatcgacgctcaagtcagaggtggcgaaacccgacaggactataaagataccaggcgtttccccctggaagctccctcgtgcgctctcctgttccgaccctgccgcttaccggatacctgtccgcctttctcccttcgggaagcgtggcgctttctcatagctcacgctgtaggtatctcagttcggtgtaggtcgttcgctccaagctgggctgtgtgcacgaaccccccgttcagcccgaccgctgcgccttatccggtaactatcgtcttgagtccaacccggtaagacacgacttatcgccactggcagcagccactggtaacaggattagcagagcgaggtatgtaggcggtgctacagagttcttgaagtggtggcctaactacggctacactagaagaacagtatttggtatctgcgctctgctgaagccagttaccttcggaaaaagagttggtagctcttgatccggcaaacaaaccaccgctggtagcggtggtttttttgtttgcaagcagcagattacgcgcagaaaaaaaggatctcaagaagatcctttgatcttttctacggggtctgacgctcagtggaacgaaaactcacgttaagggattttggtcatgagattatcaaaaaggatcttcacctagatccttttaaattaaaaatgaagttttaaatcaatctaaagtatatatgagtaaacttggtctgacagttaccaatgcttaatcagtgaggcacctatctcagcgatctgtctatttcgttcatccatagttgcctgactccccgtcgtgtagataactacgatacgggagggcttaccatctggccccagtgctgcaatgataccgcgagacccacgctcaccggctccagatttatcagcaataaaccagccagccggaagggccgagcgcagaagtggtcctgcaactttatccgcctccatccagtctattaattgttgccgggaagctagagtaagtagttcgccagttaatagtttgcgcaacgttgttgccattgctacaggcatcgtggtgtcacgctcgtcgtttggtatggcttcattcagctccggttcccaacgatcaaggcgagttacatgatcccccatgttgtgcaaaaaagcggttagctccttcggtcctccgatcgttgtcagaagtaagttggccgcagtgttatcactcatggttatggcagcactgcataattctcttactgtcatgccatccgtaagatgcttttctgtgactggtgagtactcaaccaagtcattctgagaatagtgtatgcggcgaccgagttgctcttgcccggcgtcaatacgggataataccgcgccacatagcagaactttaaaagtgctcatcattggaaaacgttcttcggggcgaaaactctcaaggatcttaccgctgttgagatccagttcgatgtaacccactcgtgcacccaactgatcttcagcatcttttactttcaccagcgtttctgggtgagcaaaaacaggaaggcaaaatgccgcaaaaaagggaataagggcgacacggaaatgttgaatactcatactcttcctttttcaatattattgaagcatttatcagggttattgtctcatgagcggatacatatttgaatgtatttagaaaaataaacaaataggggttccgcgcacatttccccgaaaagtgccacctgggtcgacattgattattgactagtaatagtaatcaattacggggtcattagttcatagcccatatatggagttccg

SEQ ID NO: 720 - DNA, 4958 bp, synthetic construct
  misc_feature 1..4958: note = Synthetic
  source 1..4958: mol_type = other DNA
cgttacataacttacggtaaatggcccgcctggctgaccgcccaacgacccccgcccattgacgtcaataatgacgtatgttcccatagtaacgccaatagggactttccattgacgtcaatgggtggagtatttacggtaaactgcccacttggcagtacatcaagtgtatcatatgccaagtacgccccctattgacgtcaatgacggtaaatggcccgcctggcattatgcccagtacatgaccttatgggactttcctacttggcagtacatctacgtattagtcatcgctattaccatggtgatgcggttttggcagtacatcaatgggcgtggatagcggtttgactcacggggatttccaagtctccaccccattgacgtcaatgggagtttgttttggcaccaaaatcaacgggactttccaaaatgtcgtaacaactccgccccattgacgcaaatgggcggtaggcgtgtacggtgggaggtctatataagcagagctggtttagtgaaccgtcagatccgctagcgctaccggactcagatcgccaccatgtacccctacgacgtgccagactacgcccctaagaagaagagaaaagtcggcggctctggcggcggaggatctggcggaggtggaagcggaggaacccagaccaacggcttccctctggaactgctgaccagacctgctcctgagagactggcctacttcgagaactacaccgtgggacaccccagactgaaagaggtgtccgagatcctgatgcggacaatcgctgaacctgccggcgctagcttcatcttcgtgtatggacctagcggcgtgggcaagaccacactgagactgagagtggaacagaaactgaccgagctggtgctgcccctgctggaatctgatagaggcagagtgcctgtcgtgggcgttgaagctgtggcccctgagagcagaaacttcaactggaaggactactacacacgggccctgatcgccctggaagaacctctgatcgaccacaagttcgactacggcgtgcggggcatcagcagagacaacttcggcaagatcaacgtggaaagcaaggtggtggccccagctctgagaagggccctcgaaaatgccctgatccacagacaccccgacgtgttctttgtggacgaggcccagcactttggcaagatggccagcggctacaagctgcaggatcagctggattgcctgaagtccctggccaacatgaccggcatcctgcactgtctgctgggcacatacgagctgctgaccttcagaaacctgagcggccagctgtctcggagaagcgtggacatccacttcagacggtactgcgccgagaatcccgaagatgtgcaggccttcaagagcgtgctgctgactttccagcagcagatgcctctggccgaggctcctgatctggtgtctcactgggagtacttctacgagagaaccctgggctgcgtgggcatcctgaagaactggctgacaagagccctgaaggacgccctggatagagaagccaccaccgtgacactgaaggacctgcagaaacgcgcttggagcgtggcccagtgccagcggatgttcaaagagatccaagagggcgaaagacagctgagcgagacagagacagacatccagaacctgagatctgccctcggcctgggagccaagcctattgtgctgcctgaggaaacccctaagaccaccagacctccaggcaaagtgggcaaaagaaagcccaagagggaccccatcggagtgcagcaggatgtgtcttgactagcataaccccttggggcgcactcctcaggtgcaggctgcctatcagaaggtggtggctggtgtggccaatgccctggctcacaaataccactgagatctttttccctctgccaaaaattatggggacatcatgaagccccttgagcatctgacttctggctaataaaggaaatttattttcattgcaatagtgtgttggaattttttgtgtctctcactcggaaggacatatgggagggcaaatcatttaaaacatcagaatgagtatttggtttagagtttggcaacatatgcccatatgctggctgccatgaacaaaggttggctataaagaggtcatcagtatatgaaacagccccctgctgtccattccttattccatagaaaagccttgacttgaggttagattttttttatattttgttttgtgttatttttttctttaacatccctaaaattttccttacatgttttactagccagatttttcctcctctcctgactactcccagtcatagctgtccctcttctcttatggagatccctcgacctgcagcccaagcttggcgtaatcatggtcatagctgtttcctgtgtgaaattgttatccgctcacaattccacacaacatacgagccggaagcataaagtgtaaagcctggggtgcctaatgagtgagctaactcacattaattgcgttgcgctcactgcccgctttccagtcgggaaacctgtcgtgccagcggatccgcatctcaattagtcagcaaccatagtcccgcccctaactccgcccatcccgcccctaactccgcccagttccgcccattctccgccccatggctgactaattttttttatttatgcagaggccgaggccgcctcggcctctgagctattccagaagtagtgaggaggcttttttggaggcctaggcttttgcaaaaagctaacttgtttattgcagcttataatggttacaaataaagcaatagcatcacaaatttcacaaataaagcatttttttcactgcattctagttgtggtttgtccaaactcatcaatgtatcttatcatgtctggatccgctgcattaatgaatcggccaacgcgcggggagaggcggtttgcgtattgggcgctcttccgcttcctcgctcactgactcgctgcgctcggtcgttcggctgcggcgagcggtatcagctcactcaaaggcggtaatacggttatccacagaatcaggggataacgcaggaaagaacatgtgagcaaaaggccagcaaaaggccaggaaccgtaaaaaggccgcgttgctggcgtttttccataggctccgcccccctgacgagcatcacaaaaatcgacgctcaagtcagaggtggcgaaacccgacaggactataaagataccaggcgtttccccctggaagctccctcgtgcgctctcctgttccgaccctgccgcttaccggatacctgtccgcctttctcccttcgggaagcgtggcgctttctcatagctcacgctgtaggtatctcagttcggtgtaggtcgttcgctccaagctgggctgtgtgcacgaaccccccgttcagcccgaccgctgcgccttatccggtaactatcgtcttgagtccaacccggtaagacacgacttatcgccactggcagcagccactggtaacaggattagcagagcgaggtatgtaggcggtgctacagagttcttgaagtggtggcctaactacggctacactagaagaacagtatttggtatctgcgctctgctgaagccagttaccttcggaaaaagagttggtagctcttgatccggcaaacaaaccaccgctggtagcggtggtttttttgtttgcaagcagcagattacgcgcagaaaaaaaggatctcaagaagatcctttgatcttttctacggggtctgacgctcagtggaacgaaaactcacgttaagggattttggtcatgagattatcaaaaaggatcttcacctagatccttttaaattaaaaatgaagttttaaatcaatctaaagtatatatgagtaaacttggtctgacagttaccaatgcttaatcagtgaggcacctatctcagcgatctgtctatttcgttcatccatagttgcctgactccccgtcgtgtagataactacgatacgggagggcttaccatctggccccagtgctgcaatgataccgcgagacccacgctcaccggctccagatttatcagcaataaaccagccagccggaagggccgagcgcagaagtggtcctgcaactttatccgcctccatccagtctattaattgttgccgggaagctagagtaagtagttcgccagttaatagtttgcgcaacgttgttgccattgctacaggcatcgtggtgtcacgctcgtcgtttggtatggcttcattcagctccggttcccaacgatcaaggcgagttacatgatcccccatgttgtgcaaaaaagcggttagctccttcggtcctccgatcgttgtcagaagtaagttggccgcagtgttatcactcatggttatggcagcactgcataattctcttactgtcatgccatccgtaagatgcttttctgtgactggtgagtactcaaccaagtcattctgagaatagtgtatgcggcgaccgagttgctcttgcccggcgtcaatacgggataataccgcgccacatagcagaactttaaaagtgctcatcattggaaaacgttcttcggggcgaaaactctcaaggatcttaccgctgttgagatccagttcgatgtaacccactcgtgcacccaactgatcttcagcatcttttactttcaccagcgtttctgggtgagcaaaaacaggaaggcaaaatgccgcaaaaaagggaataagggcgacacggaaatgttgaatactcatactcttcctttttcaatattattgaagcatttatcagggttattgtctcatgagcggatacatatttgaatgtatttagaaaaataaacaaataggggttccgcgcacatttccccgaaaagtgccacctgggtcgacattgattattgactagtaatagtaatcaattacggggtcattagttcatagcccatatatggagttccg

SEQ ID NO: 721 - DNA, 5204 bp, synthetic construct
  misc_feature 1..5204: note = Synthetic
  source 1..5204: mol_type = other DNA
cgttacataacttacggtaaatggcccgcctggctgaccgcccaacgacccccgcccattgacgtcaataatgacgtatgttcccatagtaacgccaatagggactttccattgacgtcaatgggtggagtatttacggtaaactgcccacttggcagtacatcaagtgtatcatatgccaagtacgccccctattgacgtcaatgacggtaaatggcccgcctggcattatgcccagtacatgaccttatgggactttcctacttggcagtacatctacgtattagtcatcgctattaccatggtgatgcggttttggcagtacatcaatgggcgtggatagcggtttgactcacggggatttccaagtctccaccccattgacgtcaatgggagtttgttttggcaccaaaatcaacgggactttccaaaatgtcgtaacaactccgccccattgacgcaaatgggcggtaggcgtgtacggtgggaggtctatataagcagagctggtttagtgaaccgtcagatccgctagcgctaccggactcagatcgccaccatgtacccctacgacgtgccagactacgcccctaagaagaagagaaaagtcggcggctctggcggcggaggatctggcggaggtggaagcggaggactggccaatggcctggtcacatacgagagctgggacctgaagcagctgagcatccctagcagaagcctgctgtaccagctgcagcctgtgggcatcagaacccctatggtggaaagcctgaccggctacatcgagagactggccgaggctcactgcatccctccagatgtgctgatctcccggatcatcacccctctgctgaagcagatcttcctgaagtcccggaccagccgggatctgagaagcctgtttgatagagccaccgccatcaacggcaccggcaatatcgctagagatctggtgcaggccctgcagaagctgaccctgatcgaggatctgcatctgctgacactgctgttttggtgcgagatcatccccacacggaacctgttcagaacccagtctgcttggtgcgccgtgtgctacgaagagtggtccctgaacaatcaagtgatctacaagcccctgctgtggaccatcaacagcgtgaaagtgtgcgccctgcacaagatttgcctgtgcctgcagtgccctcactgccagcaagaactgcctctgctgtcttggagaagcagacccggctactgctctaagtgtggcggatggctgggcatgaacctgcctgtgaagtctgcctctgagctgatggcctgtagcaccctgagcaaagaggaactgcacagccagacctggatcgtggaagtgatcggcgagctgattagcagcaccctgtccttcaagagccctcctgtgaaagaggaaatcgccaagagcctgagcctgctgatcgacgccgtgaccgatggaaatatcgccgagttcgcccggctgatgggcatccctaagaacaccctgtggatgtggcagaccggaaaggctctgcccgtgctggatatcctgctgaagatctgttaccggctggaaatcagcctgctggatctgctgaaacccgagcagctggccgtgaagtccttcaccaagatcagccacaagaccttccggcggagccccacattgagagcctctccaaagctgttcgacgccaaccaggtgcaggatgccctgctggctattctggccagcgacaaagaacctcctctgaccatggaagaggtggccacaggcctgggctacgacagaagaaccatcttcagacacttccccgacctgtgcagagccatcagcgccaagtacagaagctacagcaaggcctgccacaccgagaaaatccagcagtcctgccgggaagtgaaacagatcgtgctgaagctgcaccaccagggcgagtatccatctgaggccagagtgtccgagatcatgacaaaccccggctacctgcggtacaagcaagttcgggctgccctgaacgagacaagaagaaagatcggcttctgactagcataaccccttggggcgcactcctcaggtgcaggctgcctatcagaaggtggtggctggtgtggccaatgccctggctcacaaataccactgagatctttttccctctgccaaaaattatggggacatcatgaagccccttgagcatctgacttctggctaataaaggaaatttattttcattgcaatagtgtgttggaattttttgtgtctctcactcggaaggacatatgggagggcaaatcatttaaaacatcagaatgagtatttggtttagagtttggcaacatatgcccatatgctggctgccatgaacaaaggttggctataaagaggtcatcagtatatgaaacagccccctgctgtccattccttattccatagaaaagccttgacttgaggttagattttttttatattttgttttgtgttatttttttctttaacatccctaaaattttccttacatgttttactagccagatttttcctcctctcctgactactcccagtcatagctgtccctcttctcttatggagatccctcgacctgcagcccaagcttggcgtaatcatggtcatagctgtttcctgtgtgaaattgttatccgctcacaattccacacaacatacgagccggaagcataaagtgtaaagcctggggtgcctaatgagtgagctaactcacattaattgcgttgcgctcactgcccgctttccagtcgggaaacctgtcgtgccagcggatccgcatctcaattagtcagcaaccatagtcccgcccctaactccgcccatcccgcccctaactccgcccagttccgcccattctccgccccatggctgactaattttttttatttatgcagaggccgaggccgcctcggcctctgagctattccagaagtagtgaggaggcttttttggaggcctaggcttttgcaaaaagctaacttgtttattgcagcttataatggttacaaataaagcaatagcatcacaaatttcacaaataaagcatttttttcactgcattctagttgtggtttgtccaaactcatcaatgtatcttatcatgtctggatccgctgcattaatgaatcggccaacgcgcggggagaggcggtttgcgtattgggcgctcttccgcttcctcgctcactgactcgctgcgctcggtcgttcggctgcggcgagcggtatcagctcactcaaaggcggtaatacggttatccacagaatcaggggataacgcaggaaagaacatgtgagcaaaaggccagcaaaaggccaggaaccgtaaaaaggccgcgttgctggcgtttttccataggctccgcccccctgacgagcatcacaaaaatcgacgctcaagtcagaggtggcgaaacccgacaggactataaagataccaggcgtttccccctggaagctccctcgtgcgctctcctgttccgaccctgccgcttaccggatacctgtccgcctttctcccttcgggaagcgtggcgctttctcatagctcacgctgtaggtatctcagttcggtgtaggtcgttcgctccaagctgggctgtgtgcacgaaccccccgttcagcccgaccgctgcgccttatccggtaactatcgtcttgagtccaacccggtaagacacgacttatcgccactggcagcagccactggtaacaggattagcagagcgaggtatgtaggcggtgctacagagttcttgaagtggtggcctaactacggctacactagaagaacagtatttggtatctgcgctctgctgaagccagttaccttcggaaaaagagttggtagctcttgatccggcaaacaaaccaccgctggtagcggtggtttttttgtttgcaagcagcagattacgcgcagaaaaaaaggatctcaagaagatcctttgatcttttctacggggtctgacgctcagtggaacgaaaactcacgttaagggattttggtcatgagattatcaaaaaggatcttcacctagatccttttaaattaaaaatgaagttttaaatcaatctaaagtatatatgagtaaacttggtctgacagttaccaatgcttaatcagtgaggcacctatctcagcgatctgtctatttcgttcatccatagttgcctgactccccgtcgtgtagataactacgatacgggagggcttaccatctggccccagtgctgcaatgataccgcgagacccacgctcaccggctccagatttatcagcaataaaccagccagccggaagggccgagcgcagaagtggtcctgcaactttatccgcctccatccagtctattaattgttgccgggaagctagagtaagtagttcgccagttaatagtttgcgcaacgttgttgccattgctacaggcatcgtggtgtcacgctcgtcgtttggtatggcttcattcagctccggttcccaacgatcaaggcgagttacatgatcccccatgttgtgcaaaaaagcggttagctccttcggtcctccgatcgttgtcagaagtaagttggccgcagtgttatcactcatggttatggcagcactgcataattctcttactgtcatgccatccgtaagatgcttttctgtgactggtgagtactcaaccaagtcattctgagaatagtgtatgcggcgaccgagttgctcttgcccggcgtcaatacgggataataccgcgccacatagcagaactttaaaagtgctcatcattggaaaacgttcttcggggcgaaaactctcaaggatcttaccgctgttgagatccagttcgatgtaacccactcgtgcacccaactgatcttcagcatcttttactttcaccagcgtttctgggtgagcaaaaacaggaaggcaaaatgccgcaaaaaagggaataagggcgacacggaaatgttgaatactcatactcttcctttttcaatattattgaagcatttatcagggttattgtctcatgagcggatacatatttgaatgtatttagaaaaataaacaaataggggttccgcgcacatttccccgaaaagtgccacctgggtcgacattgattattgactagtaatagtaatcaattacggggtcattagttcatagcccatatatggagttccg

SEQ ID NO: 722 - DNA, 4445 bp, synthetic construct
  misc_feature 1..4445: note = Synthetic
  source 1..4445: mol_type = other DNA
cgttacataacttacggtaaatggcccgcctggctgaccgcccaacgacccccgcccattgacgtcaataatgacgtatgttcccatagtaacgccaatagggactttccattgacgtcaatgggtggagtatttacggtaaactgcccacttggcagtacatcaagtgtatcatatgccaagtacgccccctattgacgtcaatgacggtaaatggcccgcctggcattatgcccagtacatgaccttatgggactttcctacttggcagtacatctacgtattagtcatcgctattaccatggtgatgcggttttggcagtacatcaatgggcgtggatagcggtttgactcacggggatttccaagtctccaccccattgacgtcaatgggagtttgttttggcaccaaaatcaacgggactttccaaaatgtcgtaacaactccgccccattgacgcaaatgggcggtaggcgtgtacggtgggaggtctatataagcagagctggtttagtgaaccgtcagatccgctagcgctaccggactcagatcgccaccatgacagcccctctgatcctgtacctggatgtgcccttcgccaccttcagagagtctcacgccagagagatgggcaagacataccccgttcctccaccagccacagtgtacggcatgctgctgtctctcgtgggcgagacagacgtgtacagacactgcggagtggaactggccattgccatgctgagcatccccaagaagtcccggatcctgcggcagatgcggagattcaagaacgccgacttctctcaccccgagaacgtgatcccttgctaccaagagatcctgagcaacctgaagtgcctgatctgggtccgaagcgagggcgagaagatccagcctagcctgagagagagaatccagctggccctggatcaccctgaactcgtcagaagattcggctgcctgttcctgggcgagagcgaccagctgatcaagagcatcaagctggtgtcccaggactacctgcagggcgtcagacagtgggtcatcagagacaacagaggctggctgaccctgccttactgggttgaccacgtgggcagcagaaatacccggttcctgagataccggatcgaggaaatccctagcagccctcctcctgacctggcctggacaatgattcagagccccatcggaggatctggcggaggcggctctggcggcggtggaagcggaggacctaagaagaagagaaaagtctacccctacgacgtgccagactacgcctgactagcataaccccttggggcgcactcctcaggtgcaggctgcctatcagaaggtggtggctggtgtggccaatgccctggctcacaaataccactgagatctttttccctctgccaaaaattatggggacatcatgaagccccttgagcatctgacttctggctaataaaggaaatttattttcattgcaatagtgtgttggaattttttgtgtctctcactcggaaggacatatgggagggcaaatcatttaaaacatcagaatgagtatttggtttagagtttggcaacatatgcccatatgctggctgccatgaacaaaggttggctataaagaggtcatcagtatatgaaacagccccctgctgtccattccttattccatagaaaagccttgacttgaggttagattttttttatattttgttttgtgttatttttttctttaacatccctaaaattttccttacatgttttactagccagatttttcctcctctcctgactactcccagtcatagctgtccctcttctcttatggagatccctcgacctgcagcccaagcttggcgtaatcatggtcatagctgtttcctgtgtgaaattgttatccgctcacaattccacacaacatacgagccggaagcataaagtgtaaagcctggggtgcctaatgagtgagctaactcacattaattgcgttgcgctcactgcccgctttccagtcgggaaacctgtcgtgccagcggatccgcatctcaattagtcagcaaccatagtcccgcccctaactccgcccatcccgcccctaactccgcccagttccgcccattctccgccccatggctgactaattttttttatttatgcagaggccgaggccgcctcggcctctgagctattccagaagtagtgaggaggcttttttggaggcctaggcttttgcaaaaagctaacttgtttattgcagcttataatggttacaaataaagcaatagcatcacaaatttcacaaataaagcatttttttcactgcattctagttgtggtttgtccaaactcatcaatgtatcttatcatgtctggatccgctgcattaatgaatcggccaacgcgcggggagaggcggtttgcgtattgggcgctcttccgcttcctcgctcactgactcgctgcgctcggtcgttcggctgcggcgagcggtatcagctcactcaaaggcggtaatacggttatccacagaatcaggggataacgcaggaaagaacatgtgagcaaaaggccagcaaaaggccaggaaccgtaaaaaggccgcgttgctggcgtttttccataggctccgcccccctgacgagcatcacaaaaatcgacgctcaagtcagaggtggcgaaacccgacaggactataaagataccaggcgtttccccctggaagctccctcgtgcgctctcctgttccgaccctgccgcttaccggatacctgtccgcctttctcccttcgggaagcgtggcgctttctcatagctcacgctgtaggtatctcagttcggtgtaggtcgttcgctccaagctgggctgtgtgcacgaaccccccgttcagcccgaccgctgcgccttatccggtaactatcgtcttgagtccaacccggtaagacacgacttatcgccactggcagcagccactggtaacaggattagcagagcgaggtatgtaggcggtgctacagagttcttgaagtggtggcctaactacggctacactagaagaacagtatttggtatctgcgctctgctgaagccagttaccttcggaaaaagagttggtagctcttgatccggcaaacaaaccaccgctggtagcggtggtttttttgtttgcaagcagcagattacgcgcagaaaaaaaggatctcaagaagatcctttgatcttttctacggggtctgacgctcagtggaacgaaaactcacgttaagggattttggtcatgagattatcaaaaaggatcttcacctagatccttttaaattaaaaatgaagttttaaatcaatctaaagtatatatgagtaaacttggtctgacagttaccaatgcttaatcagtgaggcacctatctcagcgatctgtctatttcgttcatccatagttgcctgactccccgtcgtgtagataactacgatacgggagggcttaccatctggccccagtgctgcaatgataccgcgagacccacgctcaccggctccagatttatcagcaataaaccagccagccggaagggccgagcgcagaagtggtcctgcaactttatccgcctccatccagtctattaattgttgccgggaagctagagtaagtagttcgccagttaatagtttgcgcaacgttgttgccattgctacaggcatcgtggtgtcacgctcgtcgtttggtatggcttcattcagctccggttcccaacgatcaaggcgagttacatgatcccccatgttgtgcaaaaaagcggttagctccttcggtcctccgatcgttgtcagaagtaagttggccgcagtgttatcactcatggttatggcagcactgcataattctcttactgtcatgccatccgtaagatgcttttctgtgactggtgagtactcaaccaagtcattctgagaatagtgtatgcggcgaccgagttgctcttgcccggcgtcaatacgggataataccgcgccacatagcagaactttaaaagtgctcatcattggaaaacgttcttcggggcgaaaactctcaaggatcttaccgctgttgagatccagttcgatgtaacccactcgtgcacccaactgatcttcagcatcttttactttcaccagcgtttctgggtgagcaaaaacaggaaggcaaaatgccgcaaaaaagggaataagggcgacacggaaatgttgaatactcatactcttcctttttcaatattattgaagcatttatcagggttattgtctcatgagcggatacatatttgaatgtatttagaaaaataaacaaataggggttccgcgcacatttccccgaaaagtgccacctgggtcgacattgattattgactagtaatagtaatcaattacggggtcattagttcatagcccatatatggagttccg

SEQ ID NO: 723 - DNA, 4469 bp, synthetic construct
  misc_feature 1..4469: note = Synthetic
  source 1..4469: mol_type = other DNA
cgttacataacttacggtaaatggcccgcctggctgaccgcccaacgacccccgcccattgacgtcaataatgacgtatgttcccatagtaacgccaatagggactttccattgacgtcaatgggtggagtatttacggtaaactgcccacttggcagtacatcaagtgtatcatatgccaagtacgccccctattgacgtcaatgacggtaaatggcccgcctggcattatgcccagtacatgaccttatgggactttcctacttggcagtacatctacgtattagtcatcgctattaccatggtgatgcggttttggcagtacatcaatgggcgtggatagcggtttgactcacggggatttccaagtctccaccccattgacgtcaatgggagtttgttttggcaccaaaatcaacgggactttccaaaatgtcgtaacaactccgccccattgacgcaaatgggcggtaggcgtgtacggtgggaggtctatataagcagagctggtttagtgaaccgtcagatccgctagcgctaccggactcagatcgccaccatggccgctctgctgatccagagcgaggaatacgtggacctgaccttcaagctgagaggcgcccctattcctctggacaacggctacgtgatctacagcgccctgagcagaatctgccccatcctgcacgagctggacaacatcggcattcaccctatcgccggcattcccaccagaaacaacctgctggaactgacagcccagagccggctgaaagtgcggattcaccaccagcagatccctctgatctacccctatctggccggacagaccttccacatcggccagaatagctaccagctggacatccccgactacaagcccctgatcagcagcgagagcgtgtacagcagactggtcatcatcaccggcttccaagagcctaccaacttcatcgaggccgtgcagcggaagctggataacaagggcatccagggcaagatcgagctgctgaccagacaggatggcacccctcagaagagacagctgaccatcaacaagcagggcaagcagttcaaagtgcgcggctttggcgtgcggatcagcgagctgaatcctgaggatagcctgacactgcaagagcagggcatctccggcaagcggaagatgatgtgcggcatcttcgtgcccgccaccagatccaaagaggaagaggaaaccggaggatctggcggaggcggctctggcggcggtggaagcggaggacctaagaagaagagaaaagtctacccctacgacgtgccagactacgcctgactagcataaccccttggggcgcactcctcaggtgcaggctgcctatcagaaggtggtggctggtgtggccaatgccctggctcacaaataccactgagatctttttccctctgccaaaaattatggggacatcatgaagccccttgagcatctgacttctggctaataaaggaaatttattttcattgcaatagtgtgttggaattttttgtgtctctcactcggaaggacatatgggagggcaaatcatttaaaacatcagaatgagtatttggtttagagtttggcaacatatgcccatatgctggctgccatgaacaaaggttggctataaagaggtcatcagtatatgaaacagccccctgctgtccattccttattccatagaaaagccttgacttgaggttagattttttttatattttgttttgtgttatttttttctttaacatccctaaaattttccttacatgttttactagccagatttttcctcctctcctgactactcccagtcatagctgtccctcttctcttatggagatccctcgacctgcagcccaagcttggcgtaatcatggtcatagctgtttcctgtgtgaaattgttatccgctcacaattccacacaacatacgagccggaagcataaagtgtaaagcctggggtgcctaatgagtgagctaactcacattaattgcgttgcgctcactgcccgctttccagtcgggaaacctgtcgtgccagcggatccgcatctcaattagtcagcaaccatagtcccgcccctaactccgcccatcccgcccctaactccgcccagttccgcccattctccgccccatggctgactaattttttttatttatgcagaggccgaggccgcctcggcctctgagctattccagaagtagtgaggaggcttttttggaggcctaggcttttgcaaaaagctaacttgtttattgcagcttataatggttacaaataaagcaatagcatcacaaatttcacaaataaagcatttttttcactgcattctagttgtggtttgtccaaactcatcaatgtatcttatcatgtctggatccgctgcattaatgaatcggccaacgcgcggggagaggcggtttgcgtattgggcgctcttccgcttcctcgctcactgactcgctgcgctcggtcgttcggctgcggcgagcggtatcagctcactcaaaggcggtaatacggttatccacagaatcaggggataacgcaggaaagaacatgtgagcaaaaggccagcaaaaggccaggaaccgtaaaaaggccgcgttgctggcgtttttccataggctccgcccccctgacgagcatcacaaaaatcgacgctcaagtcagaggtggcgaaacccgacaggactataaagataccaggcgtttccccctggaagctccctcgtgcgctctcctgttccgaccctgccgcttaccggatacctgtccgcctttctcccttcgggaagcgtggcgctttctcatagctcacgctgtaggtatctcagttcggtgtaggtcgttcgctccaagctgggctgtgtgcacgaaccccccgttcagcccgaccgctgcgccttatccggtaactatcgtcttgagtccaacccggtaagacacgacttatcgccactggcagcagccactggtaacaggattagcagagcgaggtatgtaggcggtgctacagagttcttgaagtggtggcctaactacggctacactagaagaacagtatttggtatctgcgctctgctgaagccagttaccttcggaaaaagagttggtagctcttgatccggcaaacaaaccaccgctggtagcggtggtttttttgtttgcaagcagcagattacgcgcagaaaaaaaggatctcaagaagatcctttgatcttttctacggggtctgacgctcagtggaacgaaaactcacgttaagggattttggtcatgagattatcaaaaaggatcttcacctagatccttttaaattaaaaatgaagttttaaatcaatctaaagtatatatgagtaaacttggtctgacagttaccaatgcttaatcagtgaggcacctatctcagcgatctgtctatttcgttcatccatagttgcctgactccccgtcgtgtagataactacgatacgggagggcttaccatctggccccagtgctgcaatgataccgcgagacccacgctcaccggctccagatttatcagcaataaaccagccagccggaagggccgagcgcagaagtggtcctgcaactttatccgcctccatccagtctattaattgttgccgggaagctagagtaagtagttcgccagttaatagtttgcgcaacgttgttgccattgctacaggcatcgtggtgtcacgctcgtcgtttggtatggcttcattcagctccggttcccaacgatcaaggcgagttacatgatcccccatgttgtgcaaaaaagcggttagctccttcggtcctccgatcgttgtcagaagtaagttggccgcagtgttatcactcatggttatggcagcactgcataattctcttactgtcatgccatccgtaagatgcttttctgtgactggtgagtactcaaccaagtcattctgagaatagtgtatgcggcgaccgagttgctcttgcccggcgtcaatacgggataataccgcgccacatagcagaactttaaaagtgctcatcattggaaaacgttcttcggggcgaaaactctcaaggatcttaccgctgttgagatccagttcgatgtaacccactcgtgcacccaactgatcttcagcatcttttactttcaccagcgtttctgggtgagcaaaaacaggaaggcaaaatgccgcaaaaaagggaataagggcgacacggaaatgttgaatactcatactcttcctttttcaatattattgaagcatttatcagggttattgtctcatgagcggatacatatttgaatgtatttagaaaaataaacaaataggggttccgcgcacatttccccgaaaagtgccacctgggtcgacattgattattgactagtaatagtaatcaattacggggtcattagttcatagcccatatatggagttccg

SEQ ID NO: 724 - DNA, 4775 bp, synthetic construct
  misc_feature 1..4775: note = Synthetic
  source 1..4775: mol_type = other DNA
cgttacataacttacggtaaatggcccgcctggctgaccgcccaacgacccccgcccattgacgtcaataatgacgtatgttcccatagtaacgccaatagggactttccattgacgtcaatgggtggagtatttacggtaaactgcccacttggcagtacatcaagtgtatcatatgccaagtacgccccctattgacgtcaatgacggtaaatggcccgcctggcattatgcccagtacatgaccttatgggactttcctacttggcagtacatctacgtattagtcatcgctattaccatggtgatgcggttttggcagtacatcaatgggcgtggatagcggtttgactcacggggatttccaagtctccaccccattgacgtcaatgggagtttgttttggcaccaaaatcaacgggactttccaaaatgtcgtaacaactccgccccattgacgcaaatgggcggtaggcgtgtacggtgggaggtctatataagcagagctggtttagtgaaccgtcagatccgctagcgctaccggactcagatcgccaccatgatgagccagaagaagaacgacaacaacatccccaactactacctgtacggcaccgtgctgaccagatacggactggccagcctgaaccacgacatgcggagaggcaacaagaccacactgcagaaaggctactggaacggcaagatccacagcttcgtgggcagcagcgccattagatgggccctgaggttctatctgcagaaacagggctacctggtcaacagagtgtgggacgaagatgagcacatcaaccggctgaccaacgaggacttcgaccccgagcagttctacgacgacgacatcttcggcttcgccctgctggaaagcgccgagatcgaggaagagacaagcaccaccaagcggaagaagaagcagaccaagaccagcacaccccaccagagaatgggagccctggccatgaatatggccgtgtctctgaccccttacgatggcgccgtgaagctgggagccaagtctggcagagagaaggacagcaccagcctgcacttcaccgagtaccacgccaccagataccagtactacttcggcatcaacgccacacacctgaaggacttcagccggatcctgcctgtgatcgacggcatcatgaacctgcctaaagtcggcggcaacagcaatatcttcaactaccctttctgccccgacagcctggtgctgcagtggaccaacaatttcgccagctacatcagctactgcttcgagtactgcgaccctcagagcaaagaggccaagttcacccaagagttcatcgacgaggtggaatgcggccagatcgagccttctcagctctggatcggcggcaccatcgtgaaggatctgcagcagctggacaacttcgacgacagccccttcaagaaggcccacatctaccggaaccggaacgagctgatcgagaacctgaaaaccgtgatcacccggaacctgggcctcgaggaatccaagggaggatctggcggaggcggctctggcggcggtggaagcggaggacctaagaagaagagaaaagtctacccctacgacgtgccagactacgcctgactagcataaccccttggggcgcactcctcaggtgcaggctgcctatcagaaggtggtggctggtgtggccaatgccctggctcacaaataccactgagatctttttccctctgccaaaaattatggggacatcatgaagccccttgagcatctgacttctggctaataaaggaaatttattttcattgcaatagtgtgttggaattttttgtgtctctcactcggaaggacatatgggagggcaaatcatttaaaacatcagaatgagtatttggtttagagtttggcaacatatgcccatatgctggctgccatgaacaaaggttggctataaagaggtcatcagtatatgaaacagccccctgctgtccattccttattccatagaaaagccttgacttgaggttagattttttttatattttgttttgtgttatttttttctttaacatccctaaaattttccttacatgttttactagccagatttttcctcctctcctgactactcccagtcatagctgtccctcttctcttatggagatccctcgacctgcagcccaagcttggcgtaatcatggtcatagctgtttcctgtgtgaaattgttatccgctcacaattccacacaacatacgagccggaagcataaagtgtaaagcctggggtgcctaatgagtgagctaactcacattaattgcgttgcgctcactgcccgctttccagtcgggaaacctgtcgtgccagcggatccgcatctcaattagtcagcaaccatagtcccgcccctaactccgcccatcccgcccctaactccgcccagttccgcccattctccgccccatggctgactaattttttttatttatgcagaggccgaggccgcctcggcctctgagctattccagaagtagtgaggaggcttttttggaggcctaggcttttgcaaaaagctaacttgtttattgcagcttataatggttacaaataaagcaatagcatcacaaatttcacaaataaagcatttttttcactgcattctagttgtggtttgtccaaactcatcaatgtatcttatcatgtctggatccgctgcattaatgaatcggccaacgcgcggggagaggcggtttgcgtattgggcgctcttccgcttcctcgctcactgactcgctgcgctcggtcgttcggctgcggcgagcggtatcagctcactcaaaggcggtaatacggttatccacagaatcaggggataacgcaggaaagaacatgtgagcaaaaggccagcaaaaggccaggaaccgtaaaaaggccgcgttgctggcgtttttccataggctccgcccccctgacgagcatcacaaaaatcgacgctcaagtcagaggtggcgaaacccgacaggactataaagataccaggcgtttccccctggaagctccctcgtgcgctctcctgttccgaccctgccgcttaccggatacctgtccgcctttctcccttcgggaagcgtggcgctttctcatagctcacgctgtaggtatctcagttcggtgtaggtcgttcgctccaagctgggctgtgtgcacgaaccccccgttcagcccgaccgctgcgccttatccggtaactatcgtcttgagtccaacccggtaagacacgacttatcgccactggcagcagccactggtaacaggattagcagagcgaggtatgtaggcggtgctacagagttcttgaagtggtggcctaactacggctacactagaagaacagtatttggtatctgcgctctgctgaagccagttaccttcggaaaaagagttggtagctcttgatccggcaaacaaaccaccgctggtagcggtggtttttttgtttgcaagcagcagattacgcgcagaaaaaaaggatctcaagaagatcctttgatcttttctacggggtctgacgctcagtggaacgaaaactcacgttaagggattttggtcatgagattatcaaaaaggatcttcacctagatccttttaaattaaaaatgaagttttaaatcaatctaaagtatatatgagtaaacttggtctgacagttaccaatgcttaatcagtgaggcacctatctcagcgatctgtctatttcgttcatccatagttgcctgactccccgtcgtgtagataactacgatacgggagggcttaccatctggccccagtgctgcaatgataccgcgagacccacgctcaccggctccagatttatcagcaataaaccagccagccggaagggccgagcgcagaagtggtcctgcaactttatccgcctccatccagtctattaattgttgccgggaagctagagtaagtagttcgccagttaatagtttgcgcaacgttgttgccattgctacaggcatcgtggtgtcacgctcgtcgtttggtatggcttcattcagctccggttcccaacgatcaaggcgagttacatgatcccccatgttgtgcaaaaaagcggttagctccttcggtcctccgatcgttgtcagaagtaagttggccgcagtgttatcactcatggttatggcagcactgcataattctcttactgtcatgccatccgtaagatgcttttctgtgactggtgagtactcaaccaagtcattctgagaatagtgtatgcggcgaccgagttgctcttgcccggcgtcaatacgggataataccgcgccacatagcagaactttaaaagtgctcatcattggaaaacgttcttcggggcgaaaactctcaaggatcttaccgctgttgagatccagttcgatgtaacccactcgtgcacccaactgatcttcagcatcttttactttcaccagcgtttctgggtgagcaaaaacaggaaggcaaaatgccgcaaaaaagggaataagggcgacacggaaatgttgaatactcatactcttcctttttcaatattattgaagcatttatcagggttattgtctcatgagcggatacatatttgaatgtatttagaaaaataaacaaataggggttccgcgcacatttccccgaaaagtgccacctgggtcgacattgattattgactagtaatagtaatcaattacggggtcattagttcatagcccatatatggagttccg

SEQ ID NO: 725 - DNA, 5384 bp, synthetic construct
  misc_feature 1..5384: note = Synthetic
  source 1..5384: mol_type = other DNA
cgttacataacttacggtaaatggcccgcctggctgaccgcccaacgacccccgcccattgacgtcaataatgacgtatgttcccatagtaacgccaatagggactttccattgacgtcaatgggtggagtatttacggtaaactgcccacttggcagtacatcaagtgtatcatatgccaagtacgccccctattgacgtcaatgacggtaaatggcccgcctggcattatgcccagtacatgaccttatgggactttcctacttggcagtacatctacgtattagtcatcgctattaccatggtgatgcggttttggcagtacatcaatgggcgtggatagcggtttgactcacggggatttccaagtctccaccccattgacgtcaatgggagtttgttttggcaccaaaatcaacgggactttccaaaatgtcgtaacaactccgccccattgacgcaaatgggcggtaggcgtgtacggtgggaggtctatataagcagagctggtttagtgaaccgtcagatccgctagcgctaccggactcagatcgccaccatggtggccacacagcccaagatcagcctgtctctggatgccgccgacaccaccatcatgcacagagttggaatggccggcctgtacatgaccctgaagcggctggaaaagcagtaccccagcagcagacagagaggcggccacatttcttggagcctgaccgccgataccatcgagctgttttggcagggcagcgactttgtggccctgagctggctgatcaaagagagctttcagctggacgacaccggcctgatccacctgacaggcctggacaacgacgccatcaacctgagccagaagatccacatccacgagggaatctgcgccgtgttcctgcggctgaacaagttttaccaggccggcgagatcgtgaacaccgagctgacagtggaagagaagaaggtggaataccagtacaagagcctgacttggtacgcccaccaggcctttgccgagaagctgtgcgaagccgatacacagcagctgcggcacgactacgtgcagatcacaagctggctgtacctcggcggaattgtgcggcatgccagaacacagaacaccaccaagctggaagaaaagcccgagtacgccctggctctgctgtttgtgcctgtcgtgtgccactactgcctgctgcacatccctagcgaggacctgaaagagaaaaagccccacagatacctggtggtcatccccgagatcaaggacttcgaggatgccagccagagaagatggcggctgcagcagctggaaacaaagcagctgcacgtgtccagcctgggagaagccggcctgctgtactacagcctggacgatattcagcccgagggcgactactaccaggcctgccaagtttggctgtacgagaagatgaaccaggccagccggcagagaaccctgatgagcatcgaggaaatcgagatcgacaagaacaccctgatcacctaccagcaggtccagaagtactttcagcccaactatcagaagatcgagtacaagcagatcttcatcaaagtgaaccccattcggtccctgatcgccgacaatctggtcaccggaatccactggtggtccaacttttgggagaaactggtcatcgaggacagcaaagagtacctgttcaaccagatcttccccaaccgcgagggcttcatcagaatggccgagaacagcgaagaggacaagcactacctgatctttatcaaggtgttccagcaggccatgaagggcaacttcgccaagatgtacgccaaggccgaggacggcaaggaccctcctatcaagaaaaaagtggaacggctgcgggccgagctgaactactgttacgatgagctgagcttcaaagagtatctgagcgacttcctcgtcagaggtggcctgaacaaatacctgaaccagaatcaggccgagatcctgctgctgatcaagaagctgccctggcaagagctgagaatctgggccctgctggccattgccagctacaagcccaaagagaagcccatcagcaaggacgacagcctgacactgaacaaccagcagctcgaagagatgaacgacgagagcgaggaagagggaggatctggcggaggcggctctggcggcggtggaagcggaggacctaagaagaagagaaaagtctacccctacgacgtgccagactacgcctgactagcataaccccttggggcgcactcctcaggtgcaggctgcctatcagaaggtggtggctggtgtggccaatgccctggctcacaaataccactgagatctttttccctctgccaaaaattatggggacatcatgaagccccttgagcatctgacttctggctaataaaggaaatttattttcattgcaatagtgtgttggaattttttgtgtctctcactcggaaggacatatgggagggcaaatcatttaaaacatcagaatgagtatttggtttagagtttggcaacatatgcccatatgctggctgccatgaacaaaggttggctataaagaggtcatcagtatatgaaacagccccctgctgtccattccttattccatagaaaagccttgacttgaggttagattttttttatattttgttttgtgttatttttttctttaacatccctaaaattttccttacatgttttactagccagatttttcctcctctcctgactactcccagtcatagctgtccctcttctcttatggagatccctcgacctgcagcccaagcttggcgtaatcatggtcatagctgtttcctgtgtgaaattgttatccgctcacaattccacacaacatacgagccggaagcataaagtgtaaagcctggggtgcctaatgagtgagctaactcacattaattgcgttgcgctcactgcccgctttccagtcgggaaacctgtcgtgccagcggatccgcatctcaattagtcagcaaccatagtcccgcccctaactccgcccatcccgcccctaactccgcccagttccgcccattctccgccccatggctgactaattttttttatttatgcagaggccgaggccgcctcggcctctgagctattccagaagtagtgaggaggcttttttggaggcctaggcttttgcaaaaagctaacttgtttattgcagcttataatggttacaaataaagcaatagcatcacaaatttcacaaataaagcatttttttcactgcattctagttgtggtttgtccaaactcatcaatgtatcttatcatgtctggatccgctgcattaatgaatcggccaacgcgcggggagaggcggtttgcgtattgggcgctcttccgcttcctcgctcactgactcgctgcgctcggtcgttcggctgcggcgagcggtatcagctcactcaaaggcggtaatacggttatccacagaatcaggggataacgcaggaaagaacatgtgagcaaaaggccagcaaaaggccaggaaccgtaaaaaggccgcgttgctggcgtttttccataggctccgcccccctgacgagcatcacaaaaatcgacgctcaagtcagaggtggcgaaacccgacaggactataaagataccaggcgtttccccctggaagctccctcgtgcgctctcctgttccgaccctgccgcttaccggatacctgtccgcctttctcccttcgggaagcgtggcgctttctcatagctcacgctgtaggtatctcagttcggtgtaggtcgttcgctccaagctgggctgtgtgcacgaaccccccgttcagcccgaccgctgcgccttatccggtaactatcgtcttgagtccaacccggtaagacacgacttatcgccactggcagcagccactggtaacaggattagcagagcgaggtatgtaggcggtgctacagagttcttgaagtggtggcctaactacggctacactagaagaacagtatttggtatctgcgctctgctgaagccagttaccttcggaaaaagagttggtagctcttgatccggcaaacaaaccaccgctggtagcggtggtttttttgtttgcaagcagcagattacgcgcagaaaaaaaggatctcaagaagatcctttgatcttttctacggggtctgacgctcagtggaacgaaaactcacgttaagggattttggtcatgagattatcaaaaaggatcttcacctagatccttttaaattaaaaatgaagttttaaatcaatctaaagtatatatgagtaaacttggtctgacagttaccaatgcttaatcagtgaggcacctatctcagcgatctgtctatttcgttcatccatagttgcctgactccccgtcgtgtagataactacgatacgggagggcttaccatctggccccagtgctgcaatgataccgcgagacccacgctcaccggctccagatttatcagcaataaaccagccagccggaagggccgagcgcagaagtggtcctgcaactttatccgcctccatccagtctattaattgttgccgggaagctagagtaagtagttcgccagttaatagtttgcgcaacgttgttgccattgctacaggcatcgtggtgtcacgctcgtcgtttggtatggcttcattcagctccggttcccaacgatcaaggcgagttacatgatcccccatgttgtgcaaaaaagcggttagctccttcggtcctccgatcgttgtcagaagtaagttggccgcagtgttatcactcatggttatggcagcactgcataattctcttactgtcatgccatccgtaagatgcttttctgtgactggtgagtactcaaccaagtcattctgagaatagtgtatgcggcgaccgagttgctcttgcccggcgtcaatacgggataataccgcgccacatagcagaactttaaaagtgctcatcattggaaaacgttcttcggggcgaaaactctcaaggatcttaccgctgttgagatccagttcgatgtaacccactcgtgcacccaactgatcttcagcatcttttactttcaccagcgtttctgggtgagcaaaaacaggaaggcaaaatgccgcaaaaaagggaataagggcgacacggaaatgttgaatactcatactcttcctttttcaatattattgaagcatttatcagggttattgtctcatgagcggatacatatttgaatgtatttagaaaaataaacaaataggggttccgcgcacatttccccgaaaagtgccacctgggtcgacattgattattgactagtaatagtaatcaattacggggtcattagttcatagcccatatatggagttccg

SEQ ID NO: 726 - DNA, 4814 bp, synthetic construct
  misc_feature 1..4814: note = Synthetic
  source 1..4814: mol_type = other DNA
cgttacataacttacggtaaatggcccgcctggctgaccgcccaacgacccccgcccattgacgtcaataatgacgtatgttcccatagtaacgccaatagggactttccattgacgtcaatgggtggagtatttacggtaaactgcccacttggcagtacatcaagtgtatcatatgccaagtacgccccctattgacgtcaatgacggtaaatggcccgcctggcattatgcccagtacatgaccttatgggactttcctacttggcagtacatctacgtattagtcatcgctattaccatggtgatgcggttttggcagtacatcaatgggcgtggatagcggtttgactcacggggatttccaagtctccaccccattgacgtcaatgggagtttgttttggcaccaaaatcaacgggactttccaaaatgtcgtaacaactccgccccattgacgcaaatgggcggtaggcgtgtacggtgggaggtctatataagcagagctggtttagtgaaccgtcagatccgctagcgctaccggactcagatcgccaccatggtcaaccccagaggcatgaccatctacctggaacactggaacctgaagcctctggaaatccctcagcggagccggctgtttagcctggaaccagtggctgtgggcacaccttatgccgagagcctgagcagctacctgcacagactggcccaggctcactgtctgaccagccagaaactggtcatgggcgagatcgcccctctgatcctgaaggacgaggacaagagcgagctgctgagcaagaacctgagccatctgctgggcaacagcgacgccaagcctaccatcaacggcatgagagagatgaccggcaagctggtcaccatcctggaagaactgaccatgcggcaggacctgcggtttctgacactgctgtcttggaagggcatgatctacgacaagggcctgttccgcaactacagagcctggtgtccttgctgctgggaagagtggatgcgcgagaacaagacaatctacgagcccctgctgtggtccttcaaggacgtggaattctgcgtgatccacaagcagcggctgatcgaggaatgccctcactgtggcagcagactgcccatcatggccaagtttagccctgccggcttctgcagcagatgctatggatggctgggccaagaagtgaagggcgaagaggaaatcgagaagtaccgcgtgaacatccagggcatctccgagctgattgccctgacacctcagctgggctacgagcctattcctatcgagctgacccggaaactgcagctgatcctgctggtgttcgagcaggccatcggcaaggatctgaacctgctgggcgatctgggcagaatcatggaaagcctgcggatcgccagcaagaccaaccagaaccagccttaccacctggtcaagctgatcatccccgtgtgcgagaaggccaagatcagcgtgtcccagctgttcggcctggactttcaagagctgggcaagatcctgttcggcaatttctccctggaactgaaactgggaggatctggcggaggcggctctggcggcggtggaagcggaggacctaagaagaagagaaaagtctacccctacgacgtgccagactacgcctgactagcataaccccttggggcgcactcctcaggtgcaggctgcctatcagaaggtggtggctggtgtggccaatgccctggctcacaaataccactgagatctttttccctctgccaaaaattatggggacatcatgaagccccttgagcatctgacttctggctaataaaggaaatttattttcattgcaatagtgtgttggaattttttgtgtctctcactcggaaggacatatgggagggcaaatcatttaaaacatcagaatgagtatttggtttagagtttggcaacatatgcccatatgctggctgccatgaacaaaggttggctataaagaggtcatcagtatatgaaacagccccctgctgtccattccttattccatagaaaagccttgacttgaggttagattttttttatattttgttttgtgttatttttttctttaacatccctaaaattttccttacatgttttactagccagatttttcctcctctcctgactactcccagtcatagctgtccctcttctcttatggagatccctcgacctgcagcccaagcttggcgtaatcatggtcatagctgtttcctgtgtgaaattgttatccgctcacaattccacacaacatacgagccggaagcataaagtgtaaagcctggggtgcctaatgagtgagctaactcacattaattgcgttgcgctcactgcccgctttccagtcgggaaacctgtcgtgccagcggatccgcatctcaattagtcagcaaccatagtcccgcccctaactccgcccatcccgcccctaactccgcccagttccgcccattctccgccccatggctgactaattttttttatttatgcagaggccgaggccgcctcggcctctgagctattccagaagtagtgaggaggcttttttggaggcctaggcttttgcaaaaagctaacttgtttattgcagcttataatggttacaaataaagcaatagcatcacaaatttcacaaataaagcatttttttcactgcattctagttgtggtttgtccaaactcatcaatgtatcttatcatgtctggatccgctgcattaatgaatcggccaacgcgcggggagaggcggtttgcgtattgggcgctcttccgcttcctcgctcactgactcgctgcgctcggtcgttcggctgcggcgagcggtatcagctcactcaaaggcggtaatacggttatccacagaatcaggggataacgcaggaaagaacatgtgagcaaaaggccagcaaaaggccaggaaccgtaaaaaggccgcgttgctggcgtttttccataggctccgcccccctgacgagcatcacaaaaatcgacgctcaagtcagaggtggcgaaacccgacaggactataaagataccaggcgtttccccctggaagctccctcgtgcgctctcctgttccgaccctgccgcttaccggatacctgtccgcctttctcccttcgggaagcgtggcgctttctcatagctcacgctgtaggtatctcagttcggtgtaggtcgttcgctccaagctgggctgtgtgcacgaaccccccgttcagcccgaccgctgcgccttatccggtaactatcgtcttgagtccaacccggtaagacacgacttatcgccactggcagcagccactggtaacaggattagcagagcgaggtatgtaggcggtgctacagagttcttgaagtggtggcctaactacggctacactagaagaacagtatttggtatctgcgctctgctgaagccagttaccttcggaaaaagagttggtagctcttgatccggcaaacaaaccaccgctggtagcggtggtttttttgtttgcaagcagcagattacgcgcagaaaaaaaggatctcaagaagatcctttgatcttttctacggggtctgacgctcagtggaacgaaaactcacgttaagggattttggtcatgagattatcaaaaaggatcttcacctagatccttttaaattaaaaatgaagttttaaatcaatctaaagtatatatgagtaaacttggtctgacagttaccaatgcttaatcagtgaggcacctatctcagcgatctgtctatttcgttcatccatagttgcctgactccccgtcgtgtagataactacgatacgggagggcttaccatctggccccagtgctgcaatgataccgcgagacccacgctcaccggctccagatttatcagcaataaaccagccagccggaagggccgagcgcagaagtggtcctgcaactttatccgcctccatccagtctattaattgttgccgggaagctagagtaagtagttcgccagttaatagtttgcgcaacgttgttgccattgctacaggcatcgtggtgtcacgctcgtcgtttggtatggcttcattcagctccggttcccaacgatcaaggcgagttacatgatcccccatgttgtgcaaaaaagcggttagctccttcggtcctccgatcgttgtcagaagtaagttggccgcagtgttatcactcatggttatggcagcactgcataattctcttactgtcatgccatccgtaagatgcttttctgtgactggtgagtactcaaccaagtcattctgagaatagtgtatgcggcgaccgagttgctcttgcccggcgtcaatacgggataataccgcgccacatagcagaactttaaaagtgctcatcattggaaaacgttcttcggggcgaaaactctcaaggatcttaccgctgttgagatccagttcgatgtaacccactcgtgcacccaactgatcttcagcatcttttactttcaccagcgtttctgggtgagcaaaaacaggaaggcaaaatgccgcaaaaaagggaataagggcgacacggaaatgttgaatactcatactcttcctttttcaatattattgaagcatttatcagggttattgtctcatgagcggatacatatttgaatgtatttagaaaaataaacaaataggggttccgcgcacatttccccgaaaagtgccacctgggtcgacattgattattgactagtaatagtaatcaattacggggtcattagttcatagcccatatatggagttccg

SEQ ID NO: 727 - DNA, 6509 bp, synthetic construct
  misc_feature 1..6509: note = Synthetic
  source 1..6509: mol_type = other DNA
cgttacataacttacggtaaatggcccgcctggctgaccgcccaacgacccccgcccattgacgtcaataatgacgtatgttcccatagtaacgccaatagggactttccattgacgtcaatgggtggagtatttacggtaaactgcccacttggcagtacatcaagtgtatcatatgccaagtacgccccctattgacgtcaatgacggtaaatggcccgcctggcattatgcccagtacatgaccttatgggactttcctacttggcagtacatctacgtattagtcatcgctattaccatggtgatgcggttttggcagtacatcaatgggcgtggatagcggtttgactcacggggatttccaagtctccaccccattgacgtcaatgggagtttgttttggcaccaaaatcaacgggactttccaaaatgtcgtaacaactccgccccattgacgcaaatgggcggtaggcgtgtacggtgggaggtctatataagcagagctggtttagtgaaccgtcagatccgctagcgctaccggactcagatcgccaccatgaaggaacagttcgagcagtgggtcgcccggctgcagatttctgaagccggccagaaaatcatcgagaaagtgcggagcagcgagcccagcagaagagttggcggcggaagcaaaaatgtggccggcagataccccagccggaagatgggagtgaccatccagttcgagagccacagagtggaactgcccgtgatctaccagctggaacacgacgaggacgtgctggaattctacgaccagcctcctcagatcaagctggactaccaggccagcaatggcagacgactgggagtgctgcacacccctgatctgttcgtgatcaggaccaatagcgccggctgggaagagtgcaagaccgagcaggatctgaagaagctggcccagaagaaccccaaccggtacttctacagccaagaggacaaccagtggcactgccctccaggcgaagtgtacgccgatcagttcggcctgtactaccggatcagaagcgacaaagaaatcaactgggtgctgcagcggaacctgcagttcctggaagattactaccgcagcgagagcctgggcgtcgaacaggctattgctcagtctctgctggccatcgtgtctagccagcctggaattacactggccgagctgctgcatcagcagacaggcgccaagagcgacgacatctacaccctgatcgtgcaagagcagatctacttcgacctgaacgccgctcctctggctgagcctgagagatgcctgatcttcagggatgagcagaccgccagcgcctacagactgatggtggaacagcccaacgtgtccctgcctgccatctctcccgtgatcaatatcgccaccggcacacccgtgtcctgggatggaaagggcctgaacatcatcctcgtgggcgagacagaagtgatcctgggcgccgagaatgaccagctgatcaagttcaagaaaaacgtgttcgaggaactcgtgcggcagggcgagatcacatctctgcagaccccagagaaaaccgacatcagcaccgagagctggcagcggttttaccaggcctctccagaggatcaggccgaggctctggaacggtacaagaccatcgagccctacctgaacggacaccctcctgagaacgagacaatccccgccagaaccatcagagactggaaggccaagtacctgacagccctgcagaagtacggctgcggctatatcggcctgctgtcccacagaagcgtgaagggcaacagacagagaaagctgcccgaggacaccctggccatcatggaaagattcattctcgaggactacgagacactgaagcagaaacggatgctggaagtgtatggcgccctggtgctggcttgtgaacagagcagtgtgatcgcccctagctacaaggccttcaccaaagaagtgaagcggcggaccggctacgagcagaccaagaagagacaaggcagaagggccgcctaccagtacgagagcttttactgggagctgacccagaaaacaccccggcacggcgatagacctttcgagatcggacacatcgatcacacccagctggacgtggaacttgtgtgctccagaaccggcagaaacctgggcagaccttgggccacctttctggtggatgcctactctagaaggctgctggccgtgtacctgaccttcgacagcccaagctaccggtcctgtctgatggtgctgcggatctgcgtgaagaggcatggcagactgcctcagatcgtggtggtggacaatggcaccgagttccacagcgtgtacttcgaaaccctgctggctaccttcgagtgcaccaagaagcagcggcctccagccaaggccagatttggcagcgtgtgcgagagactgttcggcaccagcaacacccagttcgtgcacaacctgctgggcaatacccagatcacccggaacgtgcggcaagtgaccaagagcgtgaaccccaagaatcaggccgtgtggacactgggactgctgtacgagtatctgtgcgcctgggcctacgaggtgtacgacacagatgaacaccccgctctgtttcagagccccagggatgcttttgccgccggaatggtcacaagcggcagcagactgcaccggatgatcccttacgacgagaacttccagatcctgacactgcccaccaccagcgagggcaaagccaaggtgcaagttggcagaggcgtgaagatcaacagcatctactactggtccaacagcttcagggacccacagatcgagaacaccagcgtgcccaccagatacgaccccttcaacatcggaatcgcctacgccttcgtcagaggccagtgggtgcagtgcatcagccagtactacagccagctgcagggcagatccgagaaagagctgaagctggctagcgccgagctgagaaagagaagcagcaactacggcagacagagccaggtgtccgccaagaacctggccgaatttctggccagcgtcgaggcccaagagacactgctggaacagagaagctacgacgccgaggccagagaagtgttcatcgtgatcgaaggcggcaaggccgccaccagcagaaatgagcagcctaagctgatccaggtgccgtttgagaacaccgacacacaggtggccgaggacgaggccattacacctgaaacactggtggtgtacgaggaattcagcctgggaggatctggcggaggcggctctggcggcggtggaagcggaggacctaagaagaagagaaaagtctacccctacgacgtgccagactacgcctgactagcataaccccttggggcgcactcctcaggtgcaggctgcctatcagaaggtggtggctggtgtggccaatgccctggctcacaaataccactgagatctttttccctctgccaaaaattatggggacatcatgaagccccttgagcatctgacttctggctaataaaggaaatttattttcattgcaatagtgtgttggaattttttgtgtctctcactcggaaggacatatgggagggcaaatcatttaaaacatcagaatgagtatttggtttagagtttggcaacatatgcccatatgctggctgccatgaacaaaggttggctataaagaggtcatcagtatatgaaacagccccctgctgtccattccttattccatagaaaagccttgacttgaggttagattttttttatattttgttttgtgttatttttttctttaacatccctaaaattttccttacatgttttactagccagatttttcctcctctcctgactactcccagtcatagctgtccctcttctcttatggagatccctcgacctgcagcccaagcttggcgtaatcatggtcatagctgtttcctgtgtgaaattgttatccgctcacaattccacacaacatacgagccggaagcataaagtgtaaagcctggggtgcctaatgagtgagctaactcacattaattgcgttgcgctcactgcccgctttccagtcgggaaacctgtcgtgccagcggatccgcatctcaattagtcagcaaccatagtcccgcccctaactccgcccatcccgcccctaactccgcccagttccgcccattctccgccccatggctgactaattttttttatttatgcagaggccgaggccgcctcggcctctgagctattccagaagtagtgaggaggcttttttggaggcctaggcttttgcaaaaagctaacttgtttattgcagcttataatggttacaaataaagcaatagcatcacaaatttcacaaataaagcatttttttcactgcattctagttgtggtttgtccaaactcatcaatgtatcttatcatgtctggatccgctgcattaatgaatcggccaacgcgcggggagaggcggtttgcgtattgggcgctcttccgcttcctcgctcactgactcgctgcgctcggtcgttcggctgcggcgagcggtatcagctcactcaaaggcggtaatacggttatccacagaatcaggggataacgcaggaaagaacatgtgagcaaaaggccagcaaaaggccaggaaccgtaaaaaggccgcgttgctggcgtttttccataggctccgcccccctgacgagcatcacaaaaatcgacgctcaagtcagaggtggcgaaacccgacaggactataaagataccaggcgtttccccctggaagctccctcgtgcgctctcctgttccgaccctgccgcttaccggatacctgtccgcctttctcccttcgggaagcgtggcgctttctcatagctcacgctgtaggtatctcagttcggtgtaggtcgttcgctccaagctgggctgtgtgcacgaaccccccgttcagcccgaccgctgcgccttatccggtaactatcgtcttgagtccaacccggtaagacacgacttatcgccactggcagcagccactggtaacaggattagcagagcgaggtatgtaggcggtgctacagagttcttgaagtggtggcctaactacggctacactagaagaacagtatttggtatctgcgctctgctgaagccagttaccttcggaaaaagagttggtagctcttgatccggcaaacaaaccaccgctggtagcggtggtttttttgtttgcaagcagcagattacgcgcagaaaaaaaggatctcaagaagatcctttgatcttttctacggggtctgacgctcagtggaacgaaaactcacgttaagggattttggtcatgagattatcaaaaaggatcttcacctagatccttttaaattaaaaatgaagttttaaatcaatctaaagtatatatgagtaaacttggtctgacagttaccaatgcttaatcagtgaggcacctatctcagcgatctgtctatttcgttcatccatagttgcctgactccccgtcgtgtagataactacgatacgggagggcttaccatctggccccagtgctgcaatgataccgcgagacccacgctcaccggctccagatttatcagcaataaaccagccagccggaagggccgagcgcagaagtggtcctgcaactttatccgcctccatccagtctattaattgttgccgggaagctagagtaagtagttcgccagttaatagtttgcgcaacgttgttgccattgctacaggcatcgtggtgtcacgctcgtcgtttggtatggcttcattcagctccggttcccaacgatcaaggcgagttacatgatcccccatgttgtgcaaaaaagcggttagctccttcggtcctccgatcgttgtcagaagtaagttggccgcagtgttatcactcatggttatggcagcactgcataattctcttactgtcatgccatccgtaagatgcttttctgtgactggtgagtactcaaccaagtcattctgagaatagtgtatgcggcgaccgagttgctcttgcccggcgtcaatacgggataataccgcgccacatagcagaactttaaaagtgctcatcattggaaaacgttcttcggggcgaaaactctcaaggatcttaccgctgttgagatccagttcgatgtaacccactcgtgcacccaactgatcttcagcatcttttactttcaccagcgtttctgggtgagcaaaaacaggaaggcaaaatgccgcaaaaaagggaataagggcgacacggaaatgttgaatactcatactcttcctttttcaatattattgaagcatttatcagggttattgtctcatgagcggatacatatttgaatgtatttagaaaaataaacaaataggggttccgcgcacatttccccgaaaagtgccacctgggtcgacattgattattgactagtaatagtaatcaattacggggtcattagttcatagcccatatatggagttccg

SEQ ID NO: 728 - DNA, 4958 bp, synthetic construct
  misc_feature 1..4958: note = Synthetic
  source 1..4958: mol_type = other DNA
cgttacataacttacggtaaatggcccgcctggctgaccgcccaacgacccccgcccattgacgtcaataatgacgtatgttcccatagtaacgccaatagggactttccattgacgtcaatgggtggagtatttacggtaaactgcccacttggcagtacatcaagtgtatcatatgccaagtacgccccctattgacgtcaatgacggtaaatggcccgcctggcattatgcccagtacatgaccttatgggactttcctacttggcagtacatctacgtattagtcatcgctattaccatggtgatgcggttttggcagtacatcaatgggcgtggatagcggtttgactcacggggatttccaagtctccaccccattgacgtcaatgggagtttgttttggcaccaaaatcaacgggactttccaaaatgtcgtaacaactccgccccattgacgcaaatgggcggtaggcgtgtacggtgggaggtctatataagcagagctggtttagtgaaccgtcagatccgctagcgctaccggactcagatcgccaccatgacccagaccaacggcttccctctggaactgctgaccagacctgctcctgagagactggcctacttcgagaactacaccgtgggacaccccagactgaaagaggtgtccgagatcctgatgcggacaatcgctgaacctgccggcgctagcttcatcttcgtgtatggacctagcggcgtgggcaagaccacactgagactgagagtggaacagaaactgaccgagctggtgctgcccctgctggaatctgatagaggcagagtgcctgtcgtgggcgttgaagctgtggcccctgagagcagaaacttcaactggaaggactactacacacgggccctgatcgccctggaagaacctctgatcgaccacaagttcgactacggcgtgcggggcatcagcagagacaacttcggcaagatcaacgtggaaagcaaggtggtggccccagctctgagaagggccctcgaaaatgccctgatccacagacaccccgacgtgttctttgtggacgaggcccagcactttggcaagatggccagcggctacaagctgcaggatcagctggattgcctgaagtccctggccaacatgaccggcatcctgcactgtctgctgggcacatacgagctgctgaccttcagaaacctgagcggccagctgtctcggagaagcgtggacatccacttcagacggtactgcgccgagaatcccgaagatgtgcaggccttcaagagcgtgctgctgactttccagcagcagatgcctctggccgaggctcctgatctggtgtctcactgggagtacttctacgagagaaccctgggctgcgtgggcatcctgaagaactggctgacaagagccctgaaggacgccctggatagagaagccaccaccgtgacactgaaggacctgcagaaacgcgcttggagcgtggcccagtgccagcggatgttcaaagagatccaagagggcgaaagacagctgagcgagacagagacagacatccagaacctgagatctgccctcggcctgggagccaagcctattgtgctgcctgaggaaacccctaagaccaccagacctccaggcaaagtgggcaaaagaaagcccaagagggaccccatcggagtgcagcaggatgtgtctggaggatctggcggaggcggctctggcggcggtggaagcggaggacctaagaagaagagaaaagtctacccctacgacgtgccagactacgcctgactagcataaccccttggggcgcactcctcaggtgcaggctgcctatcagaaggtggtggctggtgtggccaatgccctggctcacaaataccactgagatctttttccctctgccaaaaattatggggacatcatgaagccccttgagcatctgacttctggctaataaaggaaatttattttcattgcaatagtgtgttggaattttttgtgtctctcactcggaaggacatatgggagggcaaatcatttaaaacatcagaatgagtatttggtttagagtttggcaacatatgcccatatgctggctgccatgaacaaaggttggctataaagaggtcatcagtatatgaaacagccccctgctgtccattccttattccatagaaaagccttgacttgaggttagattttttttatattttgttttgtgttatttttttctttaacatccctaaaattttccttacatgttttactagccagatttttcctcctctcctgactactcccagtcatagctgtccctcttctcttatggagatccctcgacctgcagcccaagcttggcgtaatcatggtcatagctgtttcctgtgtgaaattgttatccgctcacaattccacacaacatacgagccggaagcataaagtgtaaagcctggggtgcctaatgagtgagctaactcacattaattgcgttgcgctcactgcccgctttccagtcgggaaacctgtcgtgccagcggatccgcatctcaattagtcagcaaccatagtcccgcccctaactccgcccatcccgcccctaactccgcccagttccgcccattctccgccccatggctgactaattttttttatttatgcagaggccgaggccgcctcggcctctgagctattccagaagtagtgaggaggcttttttggaggcctaggcttttgcaaaaagctaacttgtttattgcagcttataatggttacaaataaagcaatagcatcacaaatttcacaaataaagcatttttttcactgcattctagttgtggtttgtccaaactcatcaatgtatcttatcatgtctggatccgctgcattaatgaatcggccaacgcgcggggagaggcggtttgcgtattgggcgctcttccgcttcctcgctcactgactcgctgcgctcggtcgttcggctgcggcgagcggtatcagctcactcaaaggcggtaatacggttatccacagaatcaggggataacgcaggaaagaacatgtgagcaaaaggccagcaaaaggccaggaaccgtaaaaaggccgcgttgctggcgtttttccataggctccgcccccctgacgagcatcacaaaaatcgacgctcaagtcagaggtggcgaaacccgacaggactataaagataccaggcgtttccccctggaagctccctcgtgcgctctcctgttccgaccctgccgcttaccggatacctgtccgcctttctcccttcgggaagcgtggcgctttctcatagctcacgctgtaggtatctcagttcggtgtaggtcgttcgctccaagctgggctgtgtgcacgaaccccccgttcagcccgaccgctgcgccttatccggtaactatcgtcttgagtccaacccggtaagacacgacttatcgccactggcagcagccactggtaacaggattagcagagcgaggtatgtaggcggtgctacagagttcttgaagtggtggcctaactacggctacactagaagaacagtatttggtatctgcgctctgctgaagccagttaccttcggaaaaagagttggtagctcttgatccggcaaacaaaccaccgctggtagcggtggtttttttgtttgcaagcagcagattacgcgcagaaaaaaaggatctcaagaagatcctttgatcttttctacggggtctgacgctcagtggaacgaaaactcacgttaagggattttggtcatgagattatcaaaaaggatcttcacctagatccttttaaattaaaaatgaagttttaaatcaatctaaagtatatatgagtaaacttggtctgacagttaccaatgcttaatcagtgaggcacctatctcagcgatctgtctatttcgttcatccatagttgcctgactccccgtcgtgtagataactacgatacgggagggcttaccatctggccccagtgctgcaatgataccgcgagacccacgctcaccggctccagatttatcagcaataaaccagccagccggaagggccgagcgcagaagtggtcctgcaactttatccgcctccatccagtctattaattgttgccgggaagctagagtaagtagttcgccagttaatagtttgcgcaacgttgttgccattgctacaggcatcgtggtgtcacgctcgtcgtttggtatggcttcattcagctccggttcccaacgatcaaggcgagttacatgatcccccatgttgtgcaaaaaagcggttagctccttcggtcctccgatcgttgtcagaagtaagttggccgcagtgttatcactcatggttatggcagcactgcataattctcttactgtcatgccatccgtaagatgcttttctgtgactggtgagtactcaaccaagtcattctgagaatagtgtatgcggcgaccgagttgctcttgcccggcgtcaatacgggataataccgcgccacatagcagaactttaaaagtgctcatcattggaaaacgttcttcggggcgaaaactctcaaggatcttaccgctgttgagatccagttcgatgtaacccactcgtgcacccaactgatcttcagcatcttttactttcaccagcgtttctgggtgagcaaaaacaggaaggcaaaatgccgcaaaaaagggaataagggcgacacggaaatgttgaatactcatactcttcctttttcaatattattgaagcatttatcagggttattgtctcatgagcggatacatatttgaatgtatttagaaaaataaacaaataggggttccgcgcacatttccccgaaaagtgccacctgggtcgacattgattattgactagtaatagtaatcaattacggggtcattagttcatagcccatatatggagttccg

SEQ ID NO: 729 - DNA, 5204 bp, synthetic construct
  misc_feature 1..5204: note = Synthetic
  source 1..5204: mol_type = other DNA
cgttacataacttacggtaaatggcccgcctggctgaccgcccaacgacccccgcccattgacgtcaataatgacgtatgttcccatagtaacgccaatagggactttccattgacgtcaatgggtggagtatttacggtaaactgcccacttggcagtacatcaagtgtatcatatgccaagtacgccccctattgacgtcaatgacggtaaatggcccgcctggcattatgcccagtacatgaccttatgggactttcctacttggcagtacatctacgtattagtcatcgctattaccatggtgatgcggttttggcagtacatcaatgggcgtggatagcggtttgactcacggggatttccaagtctccaccccattgacgtcaatgggagtttgttttggcaccaaaatcaacgggactttccaaaatgtcgtaacaactccgccccattgacgcaaatgggcggtaggcgtgtacggtgggaggtctatataagcagagctggtttagtgaaccgtcagatccgctagcgctaccggactcagatcgccaccatgctggccaatggcctggtcacatacgagagctgggacctgaagcagctgagcatccctagcagaagcctgctgtaccagctgcagcctgtgggcatcagaacccctatggtggaaagcctgaccggctacatcgagagactggccgaggctcactgcatccctccagatgtgctgatctcccggatcatcacccctctgctgaagcagatcttcctgaagtcccggaccagccgggatctgagaagcctgtttgatagagccaccgccatcaacggcaccggcaatatcgctagagatctggtgcaggccctgcagaagctgaccctgatcgaggatctgcatctgctgacactgctgttttggtgcgagatcatccccacacggaacctgttcagaacccagtctgcttggtgcgccgtgtgctacgaagagtggtccctgaacaatcaagtgatctacaagcccctgctgtggaccatcaacagcgtgaaagtgtgcgccctgcacaagatttgcctgtgcctgcagtgccctcactgccagcaagaactgcctctgctgtcttggagaagcagacccggctactgctctaagtgtggcggatggctgggcatgaacctgcctgtgaagtctgcctctgagctgatggcctgtagcaccctgagcaaagaggaactgcacagccagacctggatcgtggaagtgatcggcgagctgattagcagcaccctgtccttcaagagccctcctgtgaaagaggaaatcgccaagagcctgagcctgctgatcgacgccgtgaccgatggaaatatcgccgagttcgcccggctgatgggcatccctaagaacaccctgtggatgtggcagaccggaaaggctctgcccgtgctggatatcctgctgaagatctgttaccggctggaaatcagcctgctggatctgctgaaacccgagcagctggccgtgaagtccttcaccaagatcagccacaagaccttccggcggagccccacattgagagcctctccaaagctgttcgacgccaaccaggtgcaggatgccctgctggctattctggccagcgacaaagaacctcctctgaccatggaagaggtggccacaggcctgggctacgacagaagaaccatcttcagacacttccccgacctgtgcagagccatcagcgccaagtacagaagctacagcaaggcctgccacaccgagaaaatccagcagtcctgccgggaagtgaaacagatcgtgctgaagctgcaccaccagggcgagtatccatctgaggccagagtgtccgagatcatgacaaaccccggctacctgcggtacaagcaagttcgggctgccctgaacgagacaagaagaaagatcggcttcggaggatctggcggaggcggctctggcggcggtggaagcggaggacctaagaagaagagaaaagtctacccctacgacgtgccagactacgcctgactagcataaccccttggggcgcactcctcaggtgcaggctgcctatcagaaggtggtggctggtgtggccaatgccctggctcacaaataccactgagatctttttccctctgccaaaaattatggggacatcatgaagccccttgagcatctgacttctggctaataaaggaaatttattttcattgcaatagtgtgttggaattttttgtgtctctcactcggaaggacatatgggagggcaaatcatttaaaacatcagaatgagtatttggtttagagtttggcaacatatgcccatatgctggctgccatgaacaaaggttggctataaagaggtcatcagtatatgaaacagccccctgctgtccattccttattccatagaaaagccttgacttgaggttagattttttttatattttgttttgtgttatttttttctttaacatccctaaaattttccttacatgttttactagccagatttttcctcctctcctgactactcccagtcatagctgtccctcttctcttatggagatccctcgacctgcagcccaagcttggcgtaatcatggtcatagctgtttcctgtgtgaaattgttatccgctcacaattccacacaacatacgagccggaagcataaagtgtaaagcctggggtgcctaatgagtgagctaactcacattaattgcgttgcgctcactgcccgctttccagtcgggaaacctgtcgtgccagcggatccgcatctcaattagtcagcaaccatagtcccgcccctaactccgcccatcccgcccctaactccgcccagttccgcccattctccgccccatggctgactaattttttttatttatgcagaggccgaggccgcctcggcctctgagctattccagaagtagtgaggaggcttttttggaggcctaggcttttgcaaaaagctaacttgtttattgcagcttataatggttacaaataaagcaatagcatcacaaatttcacaaataaagcatttttttcactgcattctagttgtggtttgtccaaactcatcaatgtatcttatcatgtctggatccgctgcattaatgaatcggccaacgcgcggggagaggcggtttgcgtattgggcgctcttccgcttcctcgctcactgactcgctgcgctcggtcgttcggctgcggcgagcggtatcagctcactcaaaggcggtaatacggttatccacagaatcaggggataacgcaggaaagaacatgtgagcaaaaggccagcaaaaggccaggaaccgtaaaaaggccgcgttgctggcgtttttccataggctccgcccccctgacgagcatcacaaaaatcgacgctcaagtcagaggtggcgaaacccgacaggactataaagataccaggcgtttccccctggaagctccctcgtgcgctctcctgttccgaccctgccgcttaccggatacctgtccgcctttctcccttcgggaagcgtggcgctttctcatagctcacgctgtaggtatctcagttcggtgtaggtcgttcgctccaagctgggctgtgtgcacgaaccccccgttcagcccgaccgctgcgccttatccggtaactatcgtcttgagtccaacccggtaagacacgacttatcgccactggcagcagccactggtaacaggattagcagagcgaggtatgtaggcggtgctacagagttcttgaagtggtggcctaactacggctacactagaagaacagtatttggtatctgcgctctgctgaagccagttaccttcggaaaaagagttggtagctcttgatccggcaaacaaaccaccgctggtagcggtggtttttttgtttgcaagcagcagattacgcgcagaaaaaaaggatctcaagaagatcctttgatcttttctacggggtctgacgctcagtggaacgaaaactcacgttaagggattttggtcatgagattatcaaaaaggatcttcacctagatccttttaaattaaaaatgaagttttaaatcaatctaaagtatatatgagtaaacttggtctgacagttaccaatgcttaatcagtgaggcacctatctcagcgatctgtctatttcgttcatccatagttgcctgactccccgtcgtgtagataactacgatacgggagggcttaccatctggccccagtgctgcaatgataccgcgagacccacgctcaccggctccagatttatcagcaataaaccagccagccggaagggccgagcgcagaagtggtcctgcaactttatccgcctccatccagtctattaattgttgccgggaagctagagtaagtagttcgccagttaatagtttgcgcaacgttgttgccattgctacaggcatcgtggtgtcacgctcgtcgtttggtatggcttcattcagctccggttcccaacgatcaaggcgagttacatgatcccccatgttgtgcaaaaaagcggttagctccttcggtcctccgatcgttgtcagaagtaagttggccgcagtgttatcactcatggttatggcagcactgcataattctcttactgtcatgccatccgtaagatgcttttctgtgactggtgagtactcaaccaagtcattctgagaatagtgtatgcggcgaccgagttgctcttgcccggcgtcaatacgggataataccgcgccacatagcagaactttaaaagtgctcatcattggaaaacgttcttcggggcgaaaactctcaaggatcttaccgctgttgagatccagttcgatgtaacccactcgtgcacccaactgatcttcagcatcttttactttcaccagcgtttctgggtgagcaaaaacaggaaggcaaaatgccgcaaaaaagggaataagggcgacacggaaatgttgaatactcatactcttcctttttcaatattattgaagcatttatcagggttattgtctcatgagcggatacatatttgaatgtatttagaaaaataaacaaataggggttccgcgcacatttccccgaaaagtgccacctgggtcgacattgattattgactagtaatagtaatcaattacggggtcattagttcatagcccatatatggagttccg

SEQ ID NO: 730 - DNA, 6509 bp, synthetic construct
  misc_feature 1..6509: note = Synthetic
  source 1..6509: mol_type = other DNA
cgttacataacttacggtaaatggcccgcctggctgaccgcccaacgacccccgcccattgacgtcaataatgacgtatgttcccatagtaacgccaatagggactttccattgacgtcaatgggtggagtatttacggtaaactgcccacttggcagtacatcaagtgtatcatatgccaagtacgccccctattgacgtcaatgacggtaaatggcccgcctggcattatgcccagtacatgaccttatgggactttcctacttggcagtacatctacgtattagtcatcgctattaccatggtgatgcggttttggcagtacatcaatgggcgtggatagcggtttgactcacggggatttccaagtctccaccccattgacgtcaatgggagtttgttttggcaccaaaatcaacgggactttccaaaatgtcgtaacaactccgccccattgacgcaaatgggcggtaggcgtgtacggtgggaggtctatataagcagagctggtttagtgaaccgtcagatccgctagcgctaccggactcagatcgccaccatgtacccctacgacgtgccagactacgcccctaagaagaagagaaaagtcggcggctctggcggcggaggatctggcggaggtggaagcggaggaaaggaacagttcgagcagtgggtcgcccggctgcagatttctgaagccggccagaaaatcatcgagaaagtgcggagcagcgagcccagcagaagagttggcggcggaagcaaaaatgtggccggcagataccccagccggaagatgggagtgaccatccagttcgagagccacagagtgcagctgcccgtgatctaccagctggaacacgacgaggacgtgctggaattctacgaccagcctcctcagatcaagctggactaccaggccagcaatggcagacgactgggagtgctgcacacccctgatctgttcgtgatcaggaccaatagcgccggctgggaagagtgcaagaccgagcaggatctgaagaagctggcccagaagaaccccaaccggtacttctacagccaagaggacaaccagtggcactgccctccaggcgaagtgtacgccgatcagttcggcctgtactaccggatcagaagcgacaaagaaatcaactgggtgctgcagcggaacctgcagttcctggaagattactaccgcagcgagagcctgggcgtcgaacaggctattgctcagtctctgctggccatcgtgtctagccagcctggaattacactggccgagctgctgcatcagcagacaggcgccaagagcgacgacatctacaccctgatcgtgcaagagcagatctacttcgacctgaacgccgctcctctggctgagcctgagagatgcctgatcttcagggatgagcagaccgccagcgcctacagactgatggtggaacagcccaacgtgtccctgcctgccatctctcccgtgatcaatatcgccaccggcacacccgtgtcctgggatggaaagggcctgaacatcatcctcgtgggcgagacagaagtgatcctgggcgccgagaatgaccagctgatcaagttcaagaaaaacgtgttcgaggaactcgtgcggcagggcgagatcacatctctgcagaccccagagaaaaccgacatcagcaccgagagctggcagcggttttaccaggcctctccagaggatcaggccgaggctctggaacggtacaagaccatcgagccctacctgaacggacaccctcctgagaacgagacaatccccgccagaaccatcagagactggaaggccaagtacctgacagccctgcagaagtacggctgcggctatatcggcctgctgtcccacagaagcgtgaagggcaacagacagagaaagctgcccgaggacaccctggccatcatggaaagattcattctcgaggactacgagacactgaagcagaaacggatgctggaagtgtatggcgccctggtgctggcttgtgaacagagcagtgtgatcgcccctagctacaaggccttcaccaaagaagtgaagcggcggaccggctacgagcagaccaagaagagacaaggcagaagggccgcctaccagtacgagagcttttactgggagctgacccagaaaacaccccggcacggcgatagacctttcgagatcggacacatcgatcacacccagctggacgtggaacttgtgtgctccagaaccggcagaaacctgggcagaccttgggccacctttctggtggatgcctactctagaaggctgctggccgtgtacctgaccttcgacagcccaagctaccggtcctgtctgatggtgctgcggatctgcgtgaagaggcatggcagactgcctcagatcgtggtggtggacaatggcaccgagttccacagcgtgtacttcgaaaccctgctggctaccttcgagtgcaccaagaagcagcggcctccagccaaggccagatttggcagcgtgtgcgagagactgttcggcaccagcaacacccagttcgtgcacaacctgctgggcaatacccagatcacccggaacgtgcggcaagtgaccaagagcgtgaaccccaagaatcaggccgtgtggacactgggactgctgtacgagtatctgtgcgcctgggcctacgaggtgtacgacacagatgaacaccccgctctgtttcagagccccagggatgcttttgccgccggaatggtcacaagcggcagcagactgcaccggatgatcccttacgacgagaacttccagatcctgacactgcccaccaccagcgagggcaaagccaaggtgcaagttggcagaggcgtgaagatcaacagcatctactactggtccaacagcttcagggacccacagatcgagaacaccagcgtgcccaccagatacgaccccttcaacatcggaatcgcctacgccttcgtcagaggccagtgggtgcagtgcatcagccagtactacagccagctgcagggcagatccgagaaagagctgaagctggctagcgccgagctgagaaagagaagcagcaactacggcagacagagccaggtgtccgccaagaacctggccgaatttctggccagcgtcgaggcccaagagacactgctggaacagagaagctacgacgccgaggccagagaagtgttcatcgtgatcgaaggcggcaaggccgccaccagcagaaatgagcagcctaagctgatccaggtgccgtttgagaacaccgacacacaggtggccgaggacgaggccattacacctgaaacactggtggtgtacgaggaattcagcctgtgactagcataaccccttggggcgcactcctcaggtgcaggctgcctatcagaaggtggtggctggtgtggccaatgccctggctcacaaataccactgagatctttttccctctgccaaaaattatggggacatcatgaagccccttgagcatctgacttctggctaataaaggaaatttattttcattgcaatagtgtgttggaattttttgtgtctctcactcggaaggacatatgggagggcaaatcatttaaaacatcagaatgagtatttggtttagagtttggcaacatatgcccatatgctggctgccatgaacaaaggttggctataaagaggtcatcagtatatgaaacagccccctgctgtccattccttattccatagaaaagccttgacttgaggttagattttttttatattttgttttgtgttatttttttctttaacatccctaaaattttccttacatgttttactagccagatttttcctcctctcctgactactcccagtcatagctgtccctcttctcttatggagatccctcgacctgcagcccaagcttggcgtaatcatggtcatagctgtttcctgtgtgaaattgttatccgctcacaattccacacaacatacgagccggaagcataaagtgtaaagcctggggtgcctaatgagtgagctaactcacattaattgcgttgcgctcactgcccgctttccagtcgggaaacctgtcgtgccagcggatccgcatctcaattagtcagcaaccatagtcccgcccctaactccgcccatcccgcccctaactccgcccagttccgcccattctccgccccatggctgactaattttttttatttatgcagaggccgaggccgcctcggcctctgagctattccagaagtagtgaggaggcttttttggaggcctaggcttttgcaaaaagctaacttgtttattgcagcttataatggttacaaataaagcaatagcatcacaaatttcacaaataaagcatttttttcactgcattctagttgtggtttgtccaaactcatcaatgtatcttatcatgtctggatccgctgcattaatgaatcggccaacgcgcggggagaggcggtttgcgtattgggcgctcttccgcttcctcgctcactgactcgctgcgctcggtcgttcggctgcggcgagcggtatcagctcactcaaaggcggtaatacggttatccacagaatcaggggataacgcaggaaagaacatgtgagcaaaaggccagcaaaaggccaggaaccgtaaaaaggccgcgttgctggcgtttttccataggctccgcccccctgacgagcatcacaaaaatcgacgctcaagtcagaggtggcgaaacccgacaggactataaagataccaggcgtttccccctggaagctccctcgtgcgctctcctgttccgaccctgccgcttaccggatacctgtccgcctttctcccttcgggaagcgtggcgctttctcatagctcacgctgtaggtatctcagttcggtgtaggtcgttcgctccaagctgggctgtgtgcacgaaccccccgttcagcccgaccgctgcgccttatccggtaactatcgtcttgagtccaacccggtaagacacgacttatcgccactggcagcagccactggtaacaggattagcagagcgaggtatgtaggcggtgctacagagttcttgaagtggtggcctaactacggctacactagaagaacagtatttggtatctgcgctctgctgaagccagttaccttcggaaaaagagttggtagctcttgatccggcaaacaaaccaccgctggtagcggtggtttttttgtttgcaagcagcagattacgcgcagaaaaaaaggatctcaagaagatcctttgatcttttctacggggtctgacgctcagtggaacgaaaactcacgttaagggattttggtcatgagattatcaaaaaggatcttcacctagatccttttaaattaaaaatgaagttttaaatcaatctaaagtatatatgagtaaacttggtctgacagttaccaatgcttaatcagtgaggcacctatctcagcgatctgtctatttcgttcatccatagttgcctgactccccgtcgtgtagataactacgatacgggagggcttaccatctggccccagtgctgcaatgataccgcgagacccacgctcaccggctccagatttatcagcaataaaccagccagccggaagggccgagcgcagaagtggtcctgcaactttatccgcctccatccagtctattaattgttgccgggaagctagagtaagtagttcgccagttaatagtttgcgcaacgttgttgccattgctacaggcatcgtggtgtcacgctcgtcgtttggtatggcttcattcagctccggttcccaacgatcaaggcgagttacatgatcccccatgttgtgcaaaaaagcggttagctccttcggtcctccgatcgttgtcagaagtaagttggccgcagtgttatcactcatggttatggcagcactgcataattctcttactgtcatgccatccgtaagatgcttttctgtgactggtgagtactcaaccaagtcattctgagaatagtgtatgcggcgaccgagttgctcttgcccggcgtcaatacgggataataccgcgccacatagcagaactttaaaagtgctcatcattggaaaacgttcttcggggcgaaaactctcaaggatcttaccgctgttgagatccagttcgatgtaacccactcgtgcacccaactgatcttcagcatcttttactttcaccagcgtttctgggtgagcaaaaacaggaaggcaaaatgccgcaaaaaagggaataagggcgacacggaaatgttgaatactcatactcttcctttttcaatattattgaagcatttatcagggttattgtctcatgagcggatacatatttgaatgtatttagaaaaataaacaaataggggttccgcgcacatttccccgaaaagtgccacctgggtcgacattgattattgactagtaatagtaatcaattacggggtcattagttcatagcccatatatggagttccg

SEQ ID NO: 731 - DNA, 6509 bp, synthetic construct
  misc_feature 1..6509: note = Synthetic
  source 1..6509: mol_type = other DNA
cgttacataacttacggtaaatggcccgcctggctgaccgcccaacgacccccgcccattgacgtcaataatgacgtatgttcccatagtaacgccaatagggactttccattgacgtcaatgggtggagtatttacggtaaactgcccacttggcagtacatcaagtgtatcatatgccaagtacgccccctattgacgtcaatgacggtaaatggcccgcctggcattatgcccagtacatgaccttatgggactttcctacttggcagtacatctacgtattagtcatcgctattaccatggtgatgcggttttggcagtacatcaatgggcgtggatagcggtttgactcacggggatttccaagtctccaccccattgacgtcaatgggagtttgttttggcaccaaaatcaacgggactttccaaaatgtcgtaacaactccgccccattgacgcaaatgggcggtaggcgtgtacggtgggaggtctatataagcagagctggtttagtgaaccgtcagatccgctagcgctaccggactcagatcgccaccatgtacccctacgacgtgccagactacgcccctaagaagaagagaaaagtcggcggctctggcggcggaggatctggcggaggtggaagcggaggaaaggaacagttcgagcagtgggtcgcccggctgcagatttctgaagccggccagaaaatcatcgagaaagtgcggagcagcgagcccagcagaagagttggcggcggaagcaaaaatgtggccggcagataccccagccggaagatgggagtgaccatccagttcgagagccacagagtggaactgcccgtgatctaccagctggaacacgacgaggacgtgctggaattctacgaccagcctcctcagatcaagctggactaccaggccagcaatggcagacgactgggagtgctgcacacccctaacctgttcgtgatcaggaccaatagcgccggctgggaagagtgcaagaccgagcaggatctgaagaagctggcccagaagaaccccaaccggtacttctacagccaagaggacaaccagtggcactgccctccaggcgaagtgtacgccgatcagttcggcctgtactaccggatcagaagcgacaaagaaatcaactgggtgctgcagcggaacctgcagttcctggaagattactaccgcagcgagagcctgggcgtcgaacaggctattgctcagtctctgctggccatcgtgtctagccagcctggaattacactggccgagctgctgcatcagcagacaggcgccaagagcgacgacatctacaccctgatcgtgcaagagcagatctacttcgacctgaacgccgctcctctggctgagcctgagagatgcctgatcttcagggatgagcagaccgccagcgcctacagactgatggtggaacagcccaacgtgtccctgcctgccatctctcccgtgatcaatatcgccaccggcacacccgtgtcctgggatggaaagggcctgaacatcatcctcgtgggcgagacagaagtgatcctgggcgccgagaatgaccagctgatcaagttcaagaaaaacgtgttcgaggaactcgtgcggcagggcgagatcacatctctgcagaccccagagaaaaccgacatcagcaccgagagctggcagcggttttaccaggcctctccagaggatcaggccgaggctctggaacggtacaagaccatcgagccctacctgaacggacaccctcctgagaacgagacaatccccgccagaaccatcagagactggaaggccaagtacctgacagccctgcagaagtacggctgcggctatatcggcctgctgtcccacagaagcgtgaagggcaacagacagagaaagctgcccgaggacaccctggccatcatggaaagattcattctcgaggactacgagacactgaagcagaaacggatgctggaagtgtatggcgccctggtgctggcttgtgaacagagcagtgtgatcgcccctagctacaaggccttcaccaaagaagtgaagcggcggaccggctacgagcagaccaagaagagacaaggcagaagggccgcctaccagtacgagagcttttactgggagctgacccagaaaacaccccggcacggcgatagacctttcgagatcggacacatcgatcacacccagctggacgtggaacttgtgtgctccagaaccggcagaaacctgggcagaccttgggccacctttctggtggatgcctactctagaaggctgctggccgtgtacctgaccttcgacagcccaagctaccggtcctgtctgatggtgctgcggatctgcgtgaagaggcatggcagactgcctcagatcgtggtggtggacaatggcaccgagttccacagcgtgtacttcgaaaccctgctggctaccttcgagtgcaccaagaagcagcggcctccagccaaggccagatttggcagcgtgtgcgagagactgttcggcaccagcaacacccagttcgtgcacaacctgctgggcaatacccagatcacccggaacgtgcggcaagtgaccaagagcgtgaaccccaagaatcaggccgtgtggacactgggactgctgtacgagtatctgtgcgcctgggcctacgaggtgtacgacacagatgaacaccccgctctgtttcagagccccagggatgcttttgccgccggaatggtcacaagcggcagcagactgcaccggatgatcccttacgacgagaacttccagatcctgacactgcccaccaccagcgagggcaaagccaaggtgcaagttggcagaggcgtgaagatcaacagcatctactactggtccaacagcttcagggacccacagatcgagaacaccagcgtgcccaccagatacgaccccttcaacatcggaatcgcctacgccttcgtcagaggccagtgggtgcagtgcatcagccagtactacagccagctgcagggcagatccgagaaagagctgaagctggctagcgccgagctgagaaagagaagcagcaactacggcagacagagccaggtgtccgccaagaacctggccgaatttctggccagcgtcgaggcccaagagacactgctggaacagagaagctacgacgccgaggccagagaagtgttcatcgtgatcgaaggcggcaaggccgccaccagcagaaatgagcagcctaagctgatccaggtgccgtttgagaacaccgacacacaggtggccgaggacgaggccattacacctgaaacactggtggtgtacgaggaattcagcctgtgactagcataaccccttggggcgcactcctcaggtgcaggctgcctatcagaaggtggtggctggtgtggccaatgccctggctcacaaataccactgagatctttttccctctgccaaaaattatggggacatcatgaagccccttgagcatctgacttctggctaataaaggaaatttattttcattgcaatagtgtgttggaattttttgtgtctctcactcggaaggacatatgggagggcaaatcatttaaaacatcagaatgagtatttggtttagagtttggcaacatatgcccatatgctggctgccatgaacaaaggttggctataaagaggtcatcagtatatgaaacagccccctgctgtccattccttattccatagaaaagccttgacttgaggttagattttttttatattttgttttgtgttatttttttctttaacatccctaaaattttccttacatgttttactagccagatttttcctcctctcctgactactcccagtcatagctgtccctcttctcttatggagatccctcgacctgcagcccaagcttggcgtaatcatggtcatagctgtttcctgtgtgaaattgttatccgctcacaattccacacaacatacgagccggaagcataaagtgtaaagcctggggtgcctaatgagtgagctaactcacattaattgcgttgcgctcactgcccgctttccagtcgggaaacctgtcgtgccagcggatccgcatctcaattagtcagcaaccatagtcccgcccctaactccgcccatcccgcccctaactccgcccagttccgcccattctccgccccatggctgactaattttttttatttatgcagaggccgaggccgcctcggcctctgagctattccagaagtagtgaggaggcttttttggaggcctaggcttttgcaaaaagctaacttgtttattgcagcttataatggttacaaataaagcaatagcatcacaaatttcacaaataaagcatttttttcactgcattctagttgtggtttgtccaaactcatcaatgtatcttatcatgtctggatccgctgcattaatgaatcggccaacgcgcggggagaggcggtttgcgtattgggcgctcttccgcttcctcgctcactgactcgctgcgctcggtcgttcggctgcggcgagcggtatcagctcactcaaaggcggtaatacggttatccacagaatcaggggataacgcaggaaagaacatgtgagcaaaaggccagcaaaaggccaggaaccgtaaaaaggccgcgttgctggcgtttttccataggctccgcccccctgacgagcatcacaaaaatcgacgctcaagtcagaggtggcgaaacccgacaggactataaagataccaggcgtttccccctggaagctccctcgtgcgctctcctgttccgaccctgccgcttaccggatacctgtccgcctttctcccttcgggaagcgtggcgctttctcatagctcacgctgtaggtatctcagttcggtgtaggtcgttcgctccaagctgggctgtgtgcacgaaccccccgttcagcccgaccgctgcgccttatccggtaactatcgtcttgagtccaacccggtaagacacgacttatcgccactggcagcagccactggtaacaggattagcagagcgaggtatgtaggcggtgctacagagttcttgaagtggtggcctaactacggctacactagaagaacagtatttggtatctgcgctctgctgaagccagttaccttcggaaaaagagttggtagctcttgatccggcaaacaaaccaccgctggtagcggtggtttttttgtttgcaagcagcagattacgcgcagaaaaaaaggatctcaagaagatcctttgatcttttctacggggtctgacgctcagtggaacgaaaactcacgttaagggattttggtcatgagattatcaaaaaggatcttcacctagatccttttaaattaaaaatgaagttttaaatcaatctaaagtatatatgagtaaacttggtctgacagttaccaatgcttaatcagtgaggcacctatctcagcgatctgtctatttcgttcatccatagttgcctgactccccgtcgtgtagataactacgatacgggagggcttaccatctggccccagtgctgcaatgataccgcgagacccacgctcaccggctccagatttatcagcaataaaccagccagccggaagggccgagcgcagaagtggtcctgcaactttatccgcctccatccagtctattaattgttgccgggaagctagagtaagtagttcgccagttaatagtttgcgcaacgttgttgccattgctacaggcatcgtggtgtcacgctcgtcgtttggtatggcttcattcagctccggttcccaacgatcaaggcgagttacatgatcccccatgttgtgcaaaaaagcggttagctccttcggtcctccgatcgttgtcagaagtaagttggccgcagtgttatcactcatggttatggcagcactgcataattctcttactgtcatgccatccgtaagatgcttttctgtgactggtgagtactcaaccaagtcattctgagaatagtgtatgcggcgaccgagttgctcttgcccggcgtcaatacgggataataccgcgccacatagcagaactttaaaagtgctcatcattggaaaacgttcttcggggcgaaaactctcaaggatcttaccgctgttgagatccagttcgatgtaacccactcgtgcacccaactgatcttcagcatcttttactttcaccagcgtttctgggtgagcaaaaacaggaaggcaaaatgccgcaaaaaagggaataagggcgacacggaaatgttgaatactcatactcttcctttttcaatattattgaagcatttatcagggttattgtctcatgagcggatacatatttgaatgtatttagaaaaataaacaaataggggttccgcgcacatttccccgaaaagtgccacctgggtcgacattgattattgactagtaatagtaatcaattacggggtcattagttcatagcccatatatggagttccg

SEQ ID NO: 732 - DNA, 6509 bp, synthetic construct
  misc_feature 1..6509: note = Synthetic
  source 1..6509: mol_type = other DNA
cgttacataacttacggtaaatggcccgcctggctgaccgcccaacgacccccgcccattgacgtcaataatgacgtatgttcccatagtaacgccaatagggactttccattgacgtcaatgggtggagtatttacggtaaactgcccacttggcagtacatcaagtgtatcatatgccaagtacgccccctattgacgtcaatgacggtaaatggcccgcctggcattatgcccagtacatgaccttatgggactttcctacttggcagtacatctacgtattagtcatcgctattaccatggtgatgcggttttggcagtacatcaatgggcgtggatagcggtttgactcacggggatttccaagtctccaccccattgacgtcaatgggagtttgttttggcaccaaaatcaacgggactttccaaaatgtcgtaacaactccgccccattgacgcaaatgggcggtaggcgtgtacggtgggaggtctatataagcagagctggtttagtgaaccgtcagatccgctagcgctaccggactcagatcgccaccatgtacccctacgacgtgccagactacgcccctaagaagaagagaaaagtcggcggctctggcggcggaggatctggcggaggtggaagcggaggaaaggaacagttcgagcagtgggtcgcccggctgcagatttctgaagccggccagaaaatcatcgagaaagtgcggagcagcgagcccagcagaagagttggcggcggaagcaaaaatgtggccggcagataccccagccggaagatgggagtgaccatccagttcgagagccacagagtggaactgcccgtgatctaccagctggaacacgacgaggacgtgctggaattctacgaccagcctcctcagatcaagctggactaccaggccagcaatggcagacgactgggagtgctgcacacccctgatctgttcgtgatcaggaccaatagcgccggctgggaagagtgccagaccgagcaggatctgaagaagctggcccagaagaaccccaaccggtacttctacagccaagaggacaaccagtggcactgccctccaggcgaagtgtacgccgatcagttcggcctgtactaccggatcagaagcgacaaagaaatcaactgggtgctgcagcggaacctgcagttcctggaagattactaccgcagcgagagcctgggcgtcgaacaggctattgctcagtctctgctggccatcgtgtctagccagcctggaattacactggccgagctgctgcatcagcagacaggcgccaagagcgacgacatctacaccctgatcgtgcaagagcagatctacttcgacctgaacgccgctcctctggctgagcctgagagatgcctgatcttcagggatgagcagaccgccagcgcctacagactgatggtggaacagcccaacgtgtccctgcctgccatctctcccgtgatcaatatcgccaccggcacacccgtgtcctgggatggaaagggcctgaacatcatcctcgtgggcgagacagaagtgatcctgggcgccgagaatgaccagctgatcaagttcaagaaaaacgtgttcgaggaactcgtgcggcagggcgagatcacatctctgcagaccccagagaaaaccgacatcagcaccgagagctggcagcggttttaccaggcctctccagaggatcaggccgaggctctggaacggtacaagaccatcgagccctacctgaacggacaccctcctgagaacgagacaatccccgccagaaccatcagagactggaaggccaagtacctgacagccctgcagaagtacggctgcggctatatcggcctgctgtcccacagaagcgtgaagggcaacagacagagaaagctgcccgaggacaccctggccatcatggaaagattcattctcgaggactacgagacactgaagcagaaacggatgctggaagtgtatggcgccctggtgctggcttgtgaacagagcagtgtgatcgcccctagctacaaggccttcaccaaagaagtgaagcggcggaccggctacgagcagaccaagaagagacaaggcagaagggccgcctaccagtacgagagcttttactgggagctgacccagaaaacaccccggcacggcgatagacctttcgagatcggacacatcgatcacacccagctggacgtggaacttgtgtgctccagaaccggcagaaacctgggcagaccttgggccacctttctggtggatgcctactctagaaggctgctggccgtgtacctgaccttcgacagcccaagctaccggtcctgtctgatggtgctgcggatctgcgtgaagaggcatggcagactgcctcagatcgtggtggtggacaatggcaccgagttccacagcgtgtacttcgaaaccctgctggctaccttcgagtgcaccaagaagcagcggcctccagccaaggccagatttggcagcgtgtgcgagagactgttcggcaccagcaacacccagttcgtgcacaacctgctgggcaatacccagatcacccggaacgtgcggcaagtgaccaagagcgtgaaccccaagaatcaggccgtgtggacactgggactgctgtacgagtatctgtgcgcctgggcctacgaggtgtacgacacagatgaacaccccgctctgtttcagagccccagggatgcttttgccgccggaatggtcacaagcggcagcagactgcaccggatgatcccttacgacgagaacttccagatcctgacactgcccaccaccagcgagggcaaagccaaggtgcaagttggcagaggcgtgaagatcaacagcatctactactggtccaacagcttcagggacccacagatcgagaacaccagcgtgcccaccagatacgaccccttcaacatcggaatcgcctacgccttcgtcagaggccagtgggtgcagtgcatcagccagtactacagccagctgcagggcagatccgagaaagagctgaagctggctagcgccgagctgagaaagagaagcagcaactacggcagacagagccaggtgtccgccaagaacctggccgaatttctggccagcgtcgaggcccaagagacactgctggaacagagaagctacgacgccgaggccagagaagtgttcatcgtgatcgaaggcggcaaggccgccaccagcagaaatgagcagcctaagctgatccaggtgccgtttgagaacaccgacacacaggtggccgaggacgaggccattacacctgaaacactggtggtgtacgaggaattcagcctgtgactagcataaccccttggggcgcactcctcaggtgcaggctgcctatcagaaggtggtggctggtgtggccaatgccctggctcacaaataccactgagatctttttccctctgccaaaaattatggggacatcatgaagccccttgagcatctgacttctggctaataaaggaaatttattttcattgcaatagtgtgttggaattttttgtgtctctcactcggaaggacatatgggagggcaaatcatttaaaacatcagaatgagtatttggtttagagtttggcaacatatgcccatatgctggctgccatgaacaaaggttggctataaagaggtcatcagtatatgaaacagccccctgctgtccattccttattccatagaaaagccttgacttgaggttagattttttttatattttgttttgtgttatttttttctttaacatccctaaaattttccttacatgttttactagccagatttttcctcctctcctgactactcccagtcatagctgtccctcttctcttatggagatccctcgacctgcagcccaagcttggcgtaatcatggtcatagctgtttcctgtgtgaaattgttatccgctcacaattccacacaacatacgagccggaagcataaagtgtaaagcctggggtgcctaatgagtgagctaactcacattaattgcgttgcgctcactgcccgctttccagtcgggaaacctgtcgtgccagcggatccgcatctcaattagtcagcaaccatagtcccgcccctaactccgcccatcccgcccctaactccgcccagttccgcccattctccgccccatggctgactaattttttttatttatgcagaggccgaggccgcctcggcctctgagctattccagaagtagtgaggaggcttttttggaggcctaggcttttgcaaaaagctaacttgtttattgcagcttataatggttacaaataaagcaatagcatcacaaatttcacaaataaagcatttttttcactgcattctagttgtggtttgtccaaactcatcaatgtatcttatcatgtctggatccgctgcattaatgaatcggccaacgcgcggggagaggcggtttgcgtattgggcgctcttccgcttcctcgctcactgactcgctgcgctcggtcgttcggctgcggcgagcggtatcagctcactcaaaggcggtaatacggttatccacagaatcaggggataacgcaggaaagaacatgtgagcaaaaggccagcaaaaggccaggaaccgtaaaaaggccgcgttgctggcgtttttccataggctccgcccccctgacgagcatcacaaaaatcgacgctcaagtcagaggtggcgaaacccgacaggactataaagataccaggcgtttccccctggaagctccctcgtgcgctctcctgttccgaccctgccgcttaccggatacctgtccgcctttctcccttcgggaagcgtggcgctttctcatagctcacgctgtaggtatctcagttcggtgtaggtcgttcgctccaagctgggctgtgtgcacgaaccccccgttcagcccgaccgctgcgccttatccggtaactatcgtcttgagtccaacccggtaagacacgacttatcgccactggcagcagccactggtaacaggattagcagagcgaggtatgtaggcggtgctacagagttcttgaagtggtggcctaactacggctacactagaagaacagtatttggtatctgcgctctgctgaagccagttaccttcggaaaaagagttggtagctcttgatccggcaaacaaaccaccgctggtagcggtggtttttttgtttgcaagcagcagattacgcgcagaaaaaaaggatctcaagaagatcctttgatcttttctacggggtctgacgctcagtggaacgaaaactcacgttaagggattttggtcatgagattatcaaaaaggatcttcacctagatccttttaaattaaaaatgaagttttaaatcaatctaaagtatatatgagtaaacttggtctgacagttaccaatgcttaatcagtgaggcacctatctcagcgatctgtctatttcgttcatccatagttgcctgactccccgtcgtgtagataactacgatacgggagggcttaccatctggccccagtgctgcaatgataccgcgagacccacgctcaccggctccagatttatcagcaataaaccagccagccggaagggccgagcgcagaagtggtcctgcaactttatccgcctccatccagtctattaattgttgccgggaagctagagtaagtagttcgccagttaatagtttgcgcaacgttgttgccattgctacaggcatcgtggtgtcacgctcgtcgtttggtatggcttcattcagctccggttcccaacgatcaaggcgagttacatgatcccccatgttgtgcaaaaaagcggttagctccttcggtcctccgatcgttgtcagaagtaagttggccgcagtgttatcactcatggttatggcagcactgcataattctcttactgtcatgccatccgtaagatgcttttctgtgactggtgagtactcaaccaagtcattctgagaatagtgtatgcggcgaccgagttgctcttgcccggcgtcaatacgggataataccgcgccacatagcagaactttaaaagtgctcatcattggaaaacgttcttcggggcgaaaactctcaaggatcttaccgctgttgagatccagttcgatgtaacccactcgtgcacccaactgatcttcagcatcttttactttcaccagcgtttctgggtgagcaaaaacaggaaggcaaaatgccgcaaaaaagggaataagggcgacacggaaatgttgaatactcatactcttcctttttcaatattattgaagcatttatcagggttattgtctcatgagcggatacatatttgaatgtatttagaaaaataaacaaataggggttccgcgcacatttccccgaaaagtgccacctgggtcgacattgattattgactagtaatagtaatcaattacggggtcattagttcatagcccatatatggagttccg

SEQ ID NO: 733 - DNA, 6509 bp, synthetic construct
  misc_feature 1..6509: note = Synthetic
  source 1..6509: mol_type = other DNA
cgttacataacttacggtaaatggcccgcctggctgaccgcccaacgacccccgcccattgacgtcaataatgacgtatgttcccatagtaacgccaatagggactttccattgacgtcaatgggtggagtatttacggtaaactgcccacttggcagtacatcaagtgtatcatatgccaagtacgccccctattgacgtcaatgacggtaaatggcccgcctggcattatgcccagtacatgaccttatgggactttcctacttggcagtacatctacgtattagtcatcgctattaccatggtgatgcggttttggcagtacatcaatgggcgtggatagcggtttgactcacggggatttccaagtctccaccccattgacgtcaatgggagtttgttttggcaccaaaatcaacgggactttccaaaatgtcgtaacaactccgccccattgacgcaaatgggcggtaggcgtgtacggtgggaggtctatataagcagagctggtttagtgaaccgtcagatccgctagcgctaccggactcagatcgccaccatgtacccctacgacgtgccagactacgcccctaagaagaagagaaaagtcggcggctctggcggcggaggatctggcggaggtggaagcggaggaaaggaacagttcgagcagtgggtcgcccggctgcagatttctgaagccggccagaaaatcatcgagaaagtgcggagcagcgagcccagcagaagagttggcggcggaagcaaaaatgtggccggcagataccccagccggaagatgggagtgaccatccagttcgagagccacagagtggaactgcccgtgatctaccagctggaacacgacgaggacgtgctggaattctacgaccagcctcctcagatcaagctggactaccaggccagcaatggcagacgactgggagtgctgcacacccctgatctgttcgtgatcaggaccaatagcgccggctgggaagagtgcaagaccgagcaggatctgaagaagctggcccagaagaaccccaaccggtacttctacagccaagaggacaaccagtggcactgccctccaggcgaagtgtacgccgatcagttcggcctgtactaccggatcagaagcgacaaagaaatcaactgggtgctgcagcggaacctgcagttcctggaagattactaccgcagcgagagcctgggcgtcgaacaggctattgctcagtctctgctggccatcgtgtctagccagcctggaattacactggccgagctgctgcatcagcagacaggcgccaagagcgacgacatctacaccctgatcgtgcaagagcagatctacttcgacctgaacgccgctcctctggctgagcctgagagatgcctgatcttcagggatgagcagaccgccagcgcctacagactgatggtggaacagcccaacgtgtccctgcctgccatctctcccgtgatcaatatcgccaccggcacacccgtgtcctgggatggaaagggcctgaacatcatcctcgtgggcgagacagaagtgatcctgggcgccgagaatgaccagctgatcaagttcaagaaaaacgtgttcgaggaactcgtgcggcagggcgagatcacatctctgcagaccccagagaaaaccgacatcagcaccgagagctggcagcggttttaccaggcctctccagaggatcaggccgaggctctggaacggtacaagaccatcgagccctacctgaacggacaccctcctgagaacgagacaatccccgccagaaccatcagagactggaaggccaagtacctgacagccctgcagaagtacggctgcggctatatcggcctgctgtcccacagaagcgtgaagggcaacagacagagaaagctgcccgaggacaccctggccatcatggaaagattcattctcgaggactacgagacactgaagcagaaacggatgctggaagtgtatggcgccctggtgctggcttgtgaacagagcagtgtgatcgcccctagctacaaggccttcaccaaagaagtgaagcggcggaccggctacgagcagaccaagaagagacaaggcagaagggccgcctaccagtacgagagcttttactgggagctgacccagaaaacaccccggcacggcgatagacctttcgagatcggacacatcaaccacacccagctggacgtggaacttgtgtgctccagaaccggcagaaacctgggcagaccttgggccacctttctggtggatgcctactctagaaggctgctggccgtgtacctgaccttcgacagcccaagctaccggtcctgtctgatggtgctgcggatctgcgtgaagaggcatggcagactgcctcagatcgtggtggtggacaatggcaccgagttccacagcgtgtacttcgaaaccctgctggctaccttcgagtgcaccaagaagcagcggcctccagccaaggccagatttggcagcgtgtgcgagagactgttcggcaccagcaacacccagttcgtgcacaacctgctgggcaatacccagatcacccggaacgtgcggcaagtgaccaagagcgtgaaccccaagaatcaggccgtgtggacactgggactgctgtacgagtatctgtgcgcctgggcctacgaggtgtacgacacagatgaacaccccgctctgtttcagagccccagggatgcttttgccgccggaatggtcacaagcggcagcagactgcaccggatgatcccttacgacgagaacttccagatcctgacactgcccaccaccagcgagggcaaagccaaggtgcaagttggcagaggcgtgaagatcaacagcatctactactggtccaacagcttcagggacccacagatcgagaacaccagcgtgcccaccagatacgaccccttcaacatcggaatcgcctacgccttcgtcagaggccagtgggtgcagtgcatcagccagtactacagccagctgcagggcagatccgagaaagagctgaagctggctagcgccgagctgagaaagagaagcagcaactacggcagacagagccaggtgtccgccaagaacctggccgaatttctggccagcgtcgaggcccaagagacactgctggaacagagaagctacgacgccgaggccagagaagtgttcatcgtgatcgaaggcggcaaggccgccaccagcagaaatgagcagcctaagctgatccaggtgccgtttgagaacaccgacacacaggtggccgaggacgaggccattacacctgaaacactggtggtgtacgaggaattcagcctgtgactagcataaccccttggggcgcactcctcaggtgcaggctgcctatcagaaggtggtggctggtgtggccaatgccctggctcacaaataccactgagatctttttccctctgccaaaaattatggggacatcatgaagccccttgagcatctgacttctggctaataaaggaaatttattttcattgcaatagtgtgttggaattttttgtgtctctcactcggaaggacatatgggagggcaaatcatttaaaacatcagaatgagtatttggtttagagtttggcaacatatgcccatatgctggctgccatgaacaaaggttggctataaagaggtcatcagtatatgaaacagccccctgctgtccattccttattccatagaaaagccttgacttgaggttagattttttttatattttgttttgtgttatttttttctttaacatccctaaaattttccttacatgttttactagccagatttttcctcctctcctgactactcccagtcatagctgtccctcttctcttatggagatccctcgacctgcagcccaagcttggcgtaatcatggtcatagctgtttcctgtgtgaaattgttatccgctcacaattccacacaacatacgagccggaagcataaagtgtaaagcctggggtgcctaatgagtgagctaactcacattaattgcgttgcgctcactgcccgctttccagtcgggaaacctgtcgtgccagcggatccgcatctcaattagtcagcaaccatagtcccgcccctaactccgcccatcccgcccctaactccgcccagttccgcccattctccgccccatggctgactaattttttttatttatgcagaggccgaggccgcctcggcctctgagctattccagaagtagtgaggaggcttttttggaggcctaggcttttgcaaaaagctaacttgtttattgcagcttataatggttacaaataaagcaatagcatcacaaatttcacaaataaagcatttttttcactgcattctagttgtggtttgtccaaactcatcaatgtatcttatcatgtctggatccgctgcattaatgaatcggccaacgcgcggggagaggcggtttgcgtattgggcgctcttccgcttcctcgctcactgactcgctgcgctcggtcgttcggctgcggcgagcggtatcagctcactcaaaggcggtaatacggttatccacagaatcaggggataacgcaggaaagaacatgtgagcaaaaggccagcaaaaggccaggaaccgtaaaaaggccgcgttgctggcgtttttccataggctccgcccccctgacgagcatcacaaaaatcgacgctcaagtcagaggtggcgaaacccgacaggactataaagataccaggcgtttccccctggaagctccctcgtgcgctctcctgttccgaccctgccgcttaccggatacctgtccgcctttctcccttcgggaagcgtggcgctttctcatagctcacgctgtaggtatctcagttcggtgtaggtcgttcgctccaagctgggctgtgtgcacgaaccccccgttcagcccgaccgctgcgccttatccggtaactatcgtcttgagtccaacccggtaagacacgacttatcgccactggcagcagccactggtaacaggattagcagagcgaggtatgtaggcggtgctacagagttcttgaagtggtggcctaactacggctacactagaagaacagtatttggtatctgcgctctgctgaagccagttaccttcggaaaaagagttggtagctcttgatccggcaaacaaaccaccgctggtagcggtggtttttttgtttgcaagcagcagattacgcgcagaaaaaaaggatctcaagaagatcctttgatcttttctacggggtctgacgctcagtggaacgaaaactcacgttaagggattttggtcatgagattatcaaaaaggatcttcacctagatccttttaaattaaaaatgaagttttaaatcaatctaaagtatatatgagtaaacttggtctgacagttaccaatgcttaatcagtgaggcacctatctcagcgatctgtctatttcgttcatccatagttgcctgactccccgtcgtgtagataactacgatacgggagggcttaccatctggccccagtgctgcaatgataccgcgagacccacgctcaccggctccagatttatcagcaataaaccagccagccggaagggccgagcgcagaagtggtcctgcaactttatccgcctccatccagtctattaattgttgccgggaagctagagtaagtagttcgccagttaatagtttgcgcaacgttgttgccattgctacaggcatcgtggtgtcacgctcgtcgtttggtatggcttcattcagctccggttcccaacgatcaaggcgagttacatgatcccccatgttgtgcaaaaaagcggttagctccttcggtcctccgatcgttgtcagaagtaagttggccgcagtgttatcactcatggttatggcagcactgcataattctcttactgtcatgccatccgtaagatgcttttctgtgactggtgagtactcaaccaagtcattctgagaatagtgtatgcggcgaccgagttgctcttgcccggcgtcaatacgggataataccgcgccacatagcagaactttaaaagtgctcatcattggaaaacgttcttcggggcgaaaactctcaaggatcttaccgctgttgagatccagttcgatgtaacccactcgtgcacccaactgatcttcagcatcttttactttcaccagcgtttctgggtgagcaaaaacaggaaggcaaaatgccgcaaaaaagggaataagggcgacacggaaatgttgaatactcatactcttcctttttcaatattattgaagcatttatcagggttattgtctcatgagcggatacatatttgaatgtatttagaaaaataaacaaataggggttccgcgcacatttccccgaaaagtgccacctgggtcgacattgattattgactagtaatagtaatcaattacggggtcattagttcatagcccatatatggagttccg

SEQ ID NO: 734 - DNA, 6509 bp, synthetic construct
  misc_feature 1..6509: note = Synthetic
  source 1..6509: mol_type = other DNA
cgttacataacttacggtaaatggcccgcctggctgaccgcccaacgacccccgcccattgacgtcaataatgacgtatgttcccatagtaacgccaatagggactttccattgacgtcaatgggtggagtatttacggtaaactgcccacttggcagtacatcaagtgtatcatatgccaagtacgccccctattgacgtcaatgacggtaaatggcccgcctggcattatgcccagtacatgaccttatgggactttcctacttggcagtacatctacgtattagtcatcgctattaccatggtgatgcggttttggcagtacatcaatgggcgtggatagcggtttgactcacggggatttccaagtctccaccccattgacgtcaatgggagtttgttttggcaccaaaatcaacgggactttccaaaatgtcgtaacaactccgccccattgacgcaaatgggcggtaggcgtgtacggtgggaggtctatataagcagagctggtttagtgaaccgtcagatccgctagcgctaccggactcagatcgccaccatgtacccctacgacgtgccagactacgcccctaagaagaagagaaaagtcggcggctctggcggcggaggatctggcggaggtggaagcggaggaaaggaacagttcgagcagtgggtcgcccggctgcagatttctgaagccggccagaaaatcatcgagaaagtgcggagcagcgagcccagcagaagagttggcggcggaagcaaaaatgtggccggcagataccccagccggaagatgggagtgaccatccagttcgagagccacagagtggaactgcccgtgatctaccagctggaacacgacgaggacgtgctggaattctacgaccagcctcctcagatcaagctggactaccaggccagcaatggcagacgactgggagtgctgcacacccctgatctgttcgtgatcaggaccaatagcgccggctgggaagagtgcaagaccgagcaggatctgaagaagctggcccagaagaaccccaaccggtacttctacagccaagaggacaaccagtggcactgccctccaggcgaagtgtacgccgatcagttcggcctgtactaccggatcagaagcgacaaagaaatcaactgggtgctgcagcggaacctgcagttcctggaagattactaccgcagcgagagcctgggcgtcgaacaggctattgctcagtctctgctggccatcgtgtctagccagcctggaattacactggccgagctgctgcatcagcagacaggcgccaagagcgacgacatctacaccctgatcgtgcaagagcagatctacttcgacctgaacgccgctcctctggctgagcctgagagatgcctgatcttcagggatgagcagaccgccagcgcctacagactgatggtggaacagcccaacgtgtccctgcctgccatctctcccgtgatcaatatcgccaccggcacacccgtgtcctgggatggaaagggcctgaacatcatcctcgtgggcgagacagaagtgatcctgggcgccgagaatgaccagctgatcaagttcaagaaaaacgtgttcgaggaactcgtgcggcagggcgagatcacatctctgcagaccccagagaaaaccgacatcagcaccgagagctggcagcggttttaccaggcctctccagaggatcaggccgaggctctggaacggtacaagaccatcgagccctacctgaacggacaccctcctgagaacgagacaatccccgccagaaccatcagagactggaaggccaagtacctgacagccctgcagaagtacggctgcggctatatcggcctgctgtcccacagaagcgtgaagggcaacagacagagaaagctgcccgaggacaccctggccatcatggaaagattcattctcgaggactacgagacactgaagcagaaacggatgctggaagtgtatggcgccctggtgctggcttgtgaacagagcagtgtgatcgcccctagctacaaggccttcaccaaagaagtgaagcggcggaccggctacgagcagaccaagaagagacaaggcagaagggccgcctaccagtacgagagcttttactgggagctgacccagaaaacaccccggcacggcgatagacctttcgagatcggacacatcgatcacacccagctggacgtggaacttgtgtgctccagaaccggcagaaacctgggcagaccttgggccacctttctggtggatgcctactctagaaggctgctggccgtgtacctgaccttcgacagcccaagctaccggtcctgtctgatggtgctgcggatctgcgtgaagaggcatggcagactgcctcagatcgtggtggtgaacaatggcaccgagttccacagcgtgtacttcgaaaccctgctggctaccttcgagtgcaccaagaagcagcggcctccagccaaggccagatttggcagcgtgtgcgagagactgttcggcaccagcaacacccagttcgtgcacaacctgctgggcaatacccagatcacccggaacgtgcggcaagtgaccaagagcgtgaaccccaagaatcaggccgtgtggacactgggactgctgtacgagtatctgtgcgcctgggcctacgaggtgtacgacacagatgaacaccccgctctgtttcagagccccagggatgcttttgccgccggaatggtcacaagcggcagcagactgcaccggatgatcccttacgacgagaacttccagatcctgacactgcccaccaccagcgagggcaaagccaaggtgcaagttggcagaggcgtgaagatcaacagcatctactactggtccaacagcttcagggacccacagatcgagaacaccagcgtgcccaccagatacgaccccttcaacatcggaatcgcctacgccttcgtcagaggccagtgggtgcagtgcatcagccagtactacagccagctgcagggcagatccgagaaagagctgaagctggctagcgccgagctgagaaagagaagcagcaactacggcagacagagccaggtgtccgccaagaacctggccgaatttctggccagcgtcgaggcccaagagacactgctggaacagagaagctacgacgccgaggccagagaagtgttcatcgtgatcgaaggcggcaaggccgccaccagcagaaatgagcagcctaagctgatccaggtgccgtttgagaacaccgacacacaggtggccgaggacgaggccattacacctgaaacactggtggtgtacgaggaattcagcctgtgactagcataaccccttggggcgcactcctcaggtgcaggctgcctatcagaaggtggtggctggtgtggccaatgccctggctcacaaataccactgagatctttttccctctgccaaaaattatggggacatcatgaagccccttgagcatctgacttctggctaataaaggaaatttattttcattgcaatagtgtgttggaattttttgtgtctctcactcggaaggacatatgggagggcaaatcatttaaaacatcagaatgagtatttggtttagagtttggcaacatatgcccatatgctggctgccatgaacaaaggttggctataaagaggtcatcagtatatgaaacagccccctgctgtccattccttattccatagaaaagccttgacttgaggttagattttttttatattttgttttgtgttatttttttctttaacatccctaaaattttccttacatgttttactagccagatttttcctcctctcctgactactcccagtcatagctgtccctcttctcttatggagatccctcgacctgcagcccaagcttggcgtaatcatggtcatagctgtttcctgtgtgaaattgttatccgctcacaattccacacaacatacgagccggaagcataaagtgtaaagcctggggtgcctaatgagtgagctaactcacattaattgcgttgcgctcactgcccgctttccagtcgggaaacctgtcgtgccagcggatccgcatctcaattagtcagcaaccatagtcccgcccctaactccgcccatcccgcccctaactccgcccagttccgcccattctccgccccatggctgactaattttttttatttatgcagaggccgaggccgcctcggcctctgagctattccagaagtagtgaggaggcttttttggaggcctaggcttttgcaaaaagctaacttgtttattgcagcttataatggttacaaataaagcaatagcatcacaaatttcacaaataaagcatttttttcactgcattctagttgtggtttgtccaaactcatcaatgtatcttatcatgtctggatccgctgcattaatgaatcggccaacgcgcggggagaggcggtttgcgtattgggcgctcttccgcttcctcgctcactgactcgctgcgctcggtcgttcggctgcggcgagcggtatcagctcactcaaaggcggtaatacggttatccacagaatcaggggataacgcaggaaagaacatgtgagcaaaaggccagcaaaaggccaggaaccgtaaaaaggccgcgttgctggcgtttttccataggctccgcccccctgacgagcatcacaaaaatcgacgctcaagtcagaggtggcgaaacccgacaggactataaagataccaggcgtttccccctggaagctccctcgtgcgctctcctgttccgaccctgccgcttaccggatacctgtccgcctttctcccttcgggaagcgtggcgctttctcatagctcacgctgtaggtatctcagttcggtgtaggtcgttcgctccaagctgggctgtgtgcacgaaccccccgttcagcccgaccgctgcgccttatccggtaactatcgtcttgagtccaacccggtaagacacgacttatcgccactggcagcagccactggtaacaggattagcagagcgaggtatgtaggcggtgctacagagttcttgaagtggtggcctaactacggctacactagaagaacagtatttggtatctgcgctctgctgaagccagttaccttcggaaaaagagttggtagctcttgatccggcaaacaaaccaccgctggtagcggtggtttttttgtttgcaagcagcagattacgcgcagaaaaaaaggatctcaagaagatcctttgatcttttctacggggtctgacgctcagtggaacgaaaactcacgttaagggattttggtcatgagattatcaaaaaggatcttcacctagatccttttaaattaaaaatgaagttttaaatcaatctaaagtatatatgagtaaacttggtctgacagttaccaatgcttaatcagtgaggcacctatctcagcgatctgtctatttcgttcatccatagttgcctgactccccgtcgtgtagataactacgatacgggagggcttaccatctggccccagtgctgcaatgataccgcgagacccacgctcaccggctccagatttatcagcaataaaccagccagccggaagggccgagcgcagaagtggtcctgcaactttatccgcctccatccagtctattaattgttgccgggaagctagagtaagtagttcgccagttaatagtttgcgcaacgttgttgccattgctacaggcatcgtggtgtcacgctcgtcgtttggtatggcttcattcagctccggttcccaacgatcaaggcgagttacatgatcccccatgttgtgcaaaaaagcggttagctccttcggtcctccgatcgttgtcagaagtaagttggccgcagtgttatcactcatggttatggcagcactgcataattctcttactgtcatgccatccgtaagatgcttttctgtgactggtgagtactcaaccaagtcattctgagaatagtgtatgcggcgaccgagttgctcttgcccggcgtcaatacgggataataccgcgccacatagcagaactttaaaagtgctcatcattggaaaacgttcttcggggcgaaaactctcaaggatcttaccgctgttgagatccagttcgatgtaacccactcgtgcacccaactgatcttcagcatcttttactttcaccagcgtttctgggtgagcaaaaacaggaaggcaaaatgccgcaaaaaagggaataagggcgacacggaaatgttgaatactcatactcttcctttttcaatattattgaagcatttatcagggttattgtctcatgagcggatacatatttgaatgtatttagaaaaataaacaaataggggttccgcgcacatttccccgaaaagtgccacctgggtcgacattgattattgactagtaatagtaatcaattacggggtcattagttcatagcccatatatggagttccg

SEQ ID NO: 735 - DNA, 6509 bp, synthetic construct
  misc_feature 1..6509: note = Synthetic
  source 1..6509: mol_type = other DNA
cgttacataacttacggtaaatggcccgcctggctgaccgcccaacgacccccgcccattgacgtcaataatgacgtatgttcccatagtaacgccaatagggactttccattgacgtcaatgggtggagtatttacggtaaactgcccacttggcagtacatcaagtgtatcatatgccaagtacgccccctattgacgtcaatgacggtaaatggcccgcctggcattatgcccagtacatgaccttatgggactttcctacttggcagtacatctacgtattagtcatcgctattaccatggtgatgcggttttggcagtacatcaatgggcgtggatagcggtttgactcacggggatttccaagtctccaccccattgacgtcaatgggagtttgttttggcaccaaaatcaacgggactttccaaaatgtcgtaacaactccgccccattgacgcaaatgggcggtaggcgtgtacggtgggaggtctatataagcagagctggtttagtgaaccgtcagatccgctagcgctaccggactcagatcgccaccatgtacccctacgacgtgccagactacgcccctaagaagaagagaaaagtcggcggctctggcggcggaggatctggcggaggtggaagcggaggaaaggaacagttcgagcagtgggtcgcccggctgcagatttctgaagccggccagaaaatcatcgagaaagtgcggagcagcgagcccagcagaagagttggcggcggaagcaaaaatgtggccggcagataccccagccggaagatgggagtgaccatccagttcgagagccacagagtggaactgcccgtgatctaccagctggaacacgacgaggacgtgctggaattctacgaccagcctcctcagatcaagctggactaccaggccagcaatggcagacgactgggagtgctgcacacccctgatctgttcgtgatcaggaccaatagcgccggctgggaagagtgcaagaccgagcaggatctgaagaagctggcccagaagaaccccaaccggtacttctacagccaagaggacaaccagtggcactgccctccaggcgaagtgtacgccgatcagttcggcctgtactaccggatcagaagcgacaaagaaatcaactgggtgctgcagcggaacctgcagttcctggaagattactaccgcagcgagagcctgggcgtcgaacaggctattgctcagtctctgctggccatcgtgtctagccagcctggaattacactggccgagctgctgcatcagcagacaggcgccaagagcgacgacatctacaccctgatcgtgcaagagcagatctacttcgacctgaacgccgctcctctggctgagcctgagagatgcctgatcttcagggatgagcagaccgccagcgcctacagactgatggtggaacagcccaacgtgtccctgcctgccatctctcccgtgatcaatatcgccaccggcacacccgtgtcctgggatggaaagggcctgaacatcatcctcgtgggcgagacagaagtgatcctgggcgccgagaatgaccagctgatcaagttcaagaaaaacgtgttcgaggaactcgtgcggcagggcgagatcacatctctgcagaccccagagaaaaccgacatcagcaccgagagctggcagcggttttaccaggcctctccagaggatcaggccgaggctctggaacggtacaagaccatcgagccctacctgaacggacaccctcctgagaacgagacaatccccgccagaaccatcagagactggaaggccaagtacctgacagccctgcagaagtacggctgcggctatatcggcctgctgtcccacagaagcgtgaagggcaacagacagagaaagctgcccgaggacaccctggccatcatggaaagattcattctcgaggactacgagacactgaagcagaaacggatgctggaagtgtatggcgccctggtgctggcttgtgaacagagcagtgtgatcgcccctagctacaaggccttcaccaaagaagtgaagcggcggaccggctacgagcagaccaagaagagacaaggcagaagggccgcctaccagtacgagagcttttactgggagctgacccagaaaacaccccggcacggcgatagacctttcgagatcggacacatcgatcacacccagctggacgtggaacttgtgtgctccagaaccggcagaaacctgggcagaccttgggccacctttctggtggatgcctactctagaaggctgctggccgtgtacctgaccttcgacagcccaagctaccggtcctgtctgatggtgctgcggatctgcgtgaagaggcatggcagactgcctcagatcgtggtggtggacaatggcaccgagttccacagcgtgtacttcgaaaccctgctggctaccttcgagtgcaccaagaagcagcggcctccagccaaggccagatttggcagcgtgtgccagagactgttcggcaccagcaacacccagttcgtgcacaacctgctgggcaatacccagatcacccggaacgtgcggcaagtgaccaagagcgtgaaccccaagaatcaggccgtgtggacactgggactgctgtacgagtatctgtgcgcctgggcctacgaggtgtacgacacagatgaacaccccgctctgtttcagagccccagggatgcttttgccgccggaatggtcacaagcggcagcagactgcaccggatgatcccttacgacgagaacttccagatcctgacactgcccaccaccagcgagggcaaagccaaggtgcaagttggcagaggcgtgaagatcaacagcatctactactggtccaacagcttcagggacccacagatcgagaacaccagcgtgcccaccagatacgaccccttcaacatcggaatcgcctacgccttcgtcagaggccagtgggtgcagtgcatcagccagtactacagccagctgcagggcagatccgagaaagagctgaagctggctagcgccgagctgagaaagagaagcagcaactacggcagacagagccaggtgtccgccaagaacctggccgaatttctggccagcgtcgaggcccaagagacactgctggaacagagaagctacgacgccgaggccagagaagtgttcatcgtgatcgaaggcggcaaggccgccaccagcagaaatgagcagcctaagctgatccaggtgccgtttgagaacaccgacacacaggtggccgaggacgaggccattacacctgaaacactggtggtgtacgaggaattcagcctgtgactagcataaccccttggggcgcactcctcaggtgcaggctgcctatcagaaggtggtggctggtgtggccaatgccctggctcacaaataccactgagatctttttccctctgccaaaaattatggggacatcatgaagccccttgagcatctgacttctggctaataaaggaaatttattttcattgcaatagtgtgttggaattttttgtgtctctcactcggaaggacatatgggagggcaaatcatttaaaacatcagaatgagtatttggtttagagtttggcaacatatgcccatatgctggctgccatgaacaaaggttggctataaagaggtcatcagtatatgaaacagccccctgctgtccattccttattccatagaaaagccttgacttgaggttagattttttttatattttgttttgtgttatttttttctttaacatccctaaaattttccttacatgttttactagccagatttttcctcctctcctgactactcccagtcatagctgtccctcttctcttatggagatccctcgacctgcagcccaagcttggcgtaatcatggtcatagctgtttcctgtgtgaaattgttatccgctcacaattccacacaacatacgagccggaagcataaagtgtaaagcctggggtgcctaatgagtgagctaactcacattaattgcgttgcgctcactgcccgctttccagtcgggaaacctgtcgtgccagcggatccgcatctcaattagtcagcaaccatagtcccgcccctaactccgcccatcccgcccctaactccgcccagttccgcccattctccgccccatggctgactaattttttttatttatgcagaggccgaggccgcctcggcctctgagctattccagaagtagtgaggaggcttttttggaggcctaggcttttgcaaaaagctaacttgtttattgcagcttataatggttacaaataaagcaatagcatcacaaatttcacaaataaagcatttttttcactgcattctagttgtggtttgtccaaactcatcaatgtatcttatcatgtctggatccgctgcattaatgaatcggccaacgcgcggggagaggcggtttgcgtattgggcgctcttccgcttcctcgctcactgactcgctgcgctcggtcgttcggctgcggcgagcggtatcagctcactcaaaggcggtaatacggttatccacagaatcaggggataacgcaggaaagaacatgtgagcaaaaggccagcaaaaggccaggaaccgtaaaaaggccgcgttgctggcgtttttccataggctccgcccccctgacgagcatcacaaaaatcgacgctcaagtcagaggtggcgaaacccgacaggactataaagataccaggcgtttccccctggaagctccctcgtgcgctctcctgttccgaccctgccgcttaccggatacctgtccgcctttctcccttcgggaagcgtggcgctttctcatagctcacgctgtaggtatctcagttcggtgtaggtcgttcgctccaagctgggctgtgtgcacgaaccccccgttcagcccgaccgctgcgccttatccggtaactatcgtcttgagtccaacccggtaagacacgacttatcgccactggcagcagccactggtaacaggattagcagagcgaggtatgtaggcggtgctacagagttcttgaagtggtggcctaactacggctacactagaagaacagtatttggtatctgcgctctgctgaagccagttaccttcggaaaaagagttggtagctcttgatccggcaaacaaaccaccgctggtagcggtggtttttttgtttgcaagcagcagattacgcgcagaaaaaaaggatctcaagaagatcctttgatcttttctacggggtctgacgctcagtggaacgaaaactcacgttaagggattttggtcatgagattatcaaaaaggatcttcacctagatccttttaaattaaaaatgaagttttaaatcaatctaaagtatatatgagtaaacttggtctgacagttaccaatgcttaatcagtgaggcacctatctcagcgatctgtctatttcgttcatccatagttgcctgactccccgtcgtgtagataactacgatacgggagggcttaccatctggccccagtgctgcaatgataccgcgagacccacgctcaccggctccagatttatcagcaataaaccagccagccggaagggccgagcgcagaagtggtcctgcaactttatccgcctccatccagtctattaattgttgccgggaagctagagtaagtagttcgccagttaatagtttgcgcaacgttgttgccattgctacaggcatcgtggtgtcacgctcgtcgtttggtatggcttcattcagctccggttcccaacgatcaaggcgagttacatgatcccccatgttgtgcaaaaaagcggttagctccttcggtcctccgatcgttgtcagaagtaagttggccgcagtgttatcactcatggttatggcagcactgcataattctcttactgtcatgccatccgtaagatgcttttctgtgactggtgagtactcaaccaagtcattctgagaatagtgtatgcggcgaccgagttgctcttgcccggcgtcaatacgggataataccgcgccacatagcagaactttaaaagtgctcatcattggaaaacgttcttcggggcgaaaactctcaaggatcttaccgctgttgagatccagttcgatgtaacccactcgtgcacccaactgatcttcagcatcttttactttcaccagcgtttctgggtgagcaaaaacaggaaggcaaaatgccgcaaaaaagggaataagggcgacacggaaatgttgaatactcatactcttcctttttcaatattattgaagcatttatcagggttattgtctcatgagcggatacatatttgaatgtatttagaaaaataaacaaataggggttccgcgcacatttccccgaaaagtgccacctgggtcgacattgattattgactagtaatagtaatcaattacggggtcattagttcatagcccatatatggagttccg

SEQ ID NO: 736 - DNA, 4958 bp, synthetic construct
  misc_feature 1..4958: note = Synthetic
  source 1..4958: mol_type = other DNA
cgttacataacttacggtaaatggcccgcctggctgaccgcccaacgacccccgcccattgacgtcaataatgacgtatgttcccatagtaacgccaatagggactttccattgacgtcaatgggtggagtatttacggtaaactgcccacttggcagtacatcaagtgtatcatatgccaagtacgccccctattgacgtcaatgacggtaaatggcccgcctggcattatgcccagtacatgaccttatgggactttcctacttggcagtacatctacgtattagtcatcgctattaccatggtgatgcggttttggcagtacatcaatgggcgtggatagcggtttgactcacggggatttccaagtctccaccccattgacgtcaatgggagtttgttttggcaccaaaatcaacgggactttccaaaatgtcgtaacaactccgccccattgacgcaaatgggcggtaggcgtgtacggtgggaggtctatataagcagagctggtttagtgaaccgtcagatccgctagcgctaccggactcagatcgccaccatgtacccctacgacgtgccagactacgcccctaagaagaagagaaaagtcggcggctctggcggcggaggatctggcggaggtggaagcggaggaacccagaccaacggcttccctctggaactgctgaccagacctgctcctgagagactggcctacttcgagaactacaccgtgggacaccccagactgaaagaggtgtccgagatcctgatgcggacaatcgctgaacctgccggcgctagcttcatcttcgtgtatggacctagcggcgtgggcaagaccacactgagactgagagtggaacagaaactgaccgagctggtgctgcccctgctggaatctgatagaggcagagtgcctgtcgtgggcgttgaagctgtggcccctgagagcagaaacttcaactggaaggactactacacacgggccctgatcgccctggaagaacctctgatcgaccacaagttcgactacggcgtgcggggcatcagcagagacaacttcggcaagatcaacgtggaaagcaaggtggtggccccagctctgagaagggccctcgaaaatgccctgatccacagagcccccgacgtgttctttgtggacgaggcccagcactttggcaagatggccagcggctacaagctgcaggatcagctggattgcctgaagtccctggccaacatgaccggcatcctgcactgtctgctgggcacatacgagctgctgaccttcagaaacctgagcggccagctgtctcggagaagcgtggacatccacttcagacggtactgcgccgagaatcccgaagatgtgcaggccttcaagagcgtgctgctgactttccagcagcagatgcctctggccgaggctcctgatctggtgtctcactgggagtacttctacgagagaaccctgggctgcgtgggcatcctgaagaactggctgacaagagccctgaaggacgccctggatagagaagccaccaccgtgacactgaaggacctgcagaaacgcgcttggagcgtggcccagtgccagcggatgttcaaagagatccaagagggcgaaagacagctgagcgagacagagacagacatccagaacctgagatctgccctcggcctgggagccaagcctattgtgctgcctgaggaaacccctaagaccaccagacctccaggcaaagtgggcaaaagaaagcccaagagggaccccatcggagtgcagcaggatgtgtcttgactagcataaccccttggggcgcactcctcaggtgcaggctgcctatcagaaggtggtggctggtgtggccaatgccctggctcacaaataccactgagatctttttccctctgccaaaaattatggggacatcatgaagccccttgagcatctgacttctggctaataaaggaaatttattttcattgcaatagtgtgttggaattttttgtgtctctcactcggaaggacatatgggagggcaaatcatttaaaacatcagaatgagtatttggtttagagtttggcaacatatgcccatatgctggctgccatgaacaaaggttggctataaagaggtcatcagtatatgaaacagccccctgctgtccattccttattccatagaaaagccttgacttgaggttagattttttttatattttgttttgtgttatttttttctttaacatccctaaaattttccttacatgttttactagccagatttttcctcctctcctgactactcccagtcatagctgtccctcttctcttatggagatccctcgacctgcagcccaagcttggcgtaatcatggtcatagctgtttcctgtgtgaaattgttatccgctcacaattccacacaacatacgagccggaagcataaagtgtaaagcctggggtgcctaatgagtgagctaactcacattaattgcgttgcgctcactgcccgctttccagtcgggaaacctgtcgtgccagcggatccgcatctcaattagtcagcaaccatagtcccgcccctaactccgcccatcccgcccctaactccgcccagttccgcccattctccgccccatggctgactaattttttttatttatgcagaggccgaggccgcctcggcctctgagctattccagaagtagtgaggaggcttttttggaggcctaggcttttgcaaaaagctaacttgtttattgcagcttataatggttacaaataaagcaatagcatcacaaatttcacaaataaagcatttttttcactgcattctagttgtggtttgtccaaactcatcaatgtatcttatcatgtctggatccgctgcattaatgaatcggccaacgcgcggggagaggcggtttgcgtattgggcgctcttccgcttcctcgctcactgactcgctgcgctcggtcgttcggctgcggcgagcggtatcagctcactcaaaggcggtaatacggttatccacagaatcaggggataacgcaggaaagaacatgtgagcaaaaggccagcaaaaggccaggaaccgtaaaaaggccgcgttgctggcgtttttccataggctccgcccccctgacgagcatcacaaaaatcgacgctcaagtcagaggtggcgaaacccgacaggactataaagataccaggcgtttccccctggaagctccctcgtgcgctctcctgttccgaccctgccgcttaccggatacctgtccgcctttctcccttcgggaagcgtggcgctttctcatagctcacgctgtaggtatctcagttcggtgtaggtcgttcgctccaagctgggctgtgtgcacgaaccccccgttcagcccgaccgctgcgccttatccggtaactatcgtcttgagtccaacccggtaagacacgacttatcgccactggcagcagccactggtaacaggattagcagagcgaggtatgtaggcggtgctacagagttcttgaagtggtggcctaactacggctacactagaagaacagtatttggtatctgcgctctgctgaagccagttaccttcggaaaaagagttggtagctcttgatccggcaaacaaaccaccgctggtagcggtggtttttttgtttgcaagcagcagattacgcgcagaaaaaaaggatctcaagaagatcctttgatcttttctacggggtctgacgctcagtggaacgaaaactcacgttaagggattttggtcatgagattatcaaaaaggatcttcacctagatccttttaaattaaaaatgaagttttaaatcaatctaaagtatatatgagtaaacttggtctgacagttaccaatgcttaatcagtgaggcacctatctcagcgatctgtctatttcgttcatccatagttgcctgactccccgtcgtgtagataactacgatacgggagggcttaccatctggccccagtgctgcaatgataccgcgagacccacgctcaccggctccagatttatcagcaataaaccagccagccggaagggccgagcgcagaagtggtcctgcaactttatccgcctccatccagtctattaattgttgccgggaagctagagtaagtagttcgccagttaatagtttgcgcaacgttgttgccattgctacaggcatcgtggtgtcacgctcgtcgtttggtatggcttcattcagctccggttcccaacgatcaaggcgagttacatgatcccccatgttgtgcaaaaaagcggttagctccttcggtcctccgatcgttgtcagaagtaagttggccgcagtgttatcactcatggttatggcagcactgcataattctcttactgtcatgccatccgtaagatgcttttctgtgactggtgagtactcaaccaagtcattctgagaatagtgtatgcggcgaccgagttgctcttgcccggcgtcaatacgggataataccgcgccacatagcagaactttaaaagtgctcatcattggaaaacgttcttcggggcgaaaactctcaaggatcttaccgctgttgagatccagttcgatgtaacccactcgtgcacccaactgatcttcagcatcttttactttcaccagcgtttctgggtgagcaaaaacaggaaggcaaaatgccgcaaaaaagggaataagggcgacacggaaatgttgaatactcatactcttcctttttcaatattattgaagcatttatcagggttattgtctcatgagcggatacatatttgaatgtatttagaaaaataaacaaataggggttccgcgcacatttccccgaaaagtgccacctgggtcgacattgattattgactagtaatagtaatcaattacggggtcattagttcatagcccatatatggagttccg

SEQ ID NO: 737 - DNA, 4958 bp, synthetic construct
  misc_feature 1..4958: note = Synthetic
  source 1..4958: mol_type = other DNA
cgttacataacttacggtaaatggcccgcctggctgaccgcccaacgacccccgcccattgacgtcaataatgacgtatgttcccatagtaacgccaatagggactttccattgacgtcaatgggtggagtatttacggtaaactgcccacttggcagtacatcaagtgtatcatatgccaagtacgccccctattgacgtcaatgacggtaaatggcccgcctggcattatgcccagtacatgaccttatgggactttcctacttggcagtacatctacgtattagtcatcgctattaccatggtgatgcggttttggcagtacatcaatgggcgtggatagcggtttgactcacggggatttccaagtctccaccccattgacgtcaatgggagtttgttttggcaccaaaatcaacgggactttccaaaatgtcgtaacaactccgccccattgacgcaaatgggcggtaggcgtgtacggtgggaggtctatataagcagagctggtttagtgaaccgtcagatccgctagcgctaccggactcagatcgccaccatgtacccctacgacgtgccagactacgcccctaagaagaagagaaaagtcggcggctctggcggcggaggatctggcggaggtggaagcggaggaacccagaccaacggcttccctctggaactgctgaccagacctgctcctgagagactggcctacttcgagaactacaccgtgggacaccccagactgaaagaggtgtccgagatcctgatgcggacaatcgctgaacctgccggcgctagcttcatcttcgtgtatggacctagcggcgtgggcaagaccacactgagactgagagtggaacagaaactgaccgagctggtgctgcccctgctggaatctgatagaggcagagtgcctgtcgtgggcgttgaagctgtggcccctgagagcagaaacttcaactggaaggactactacacacgggccctgatcgccctggaagaacctctgatcgaccacaagttcgactacggcgtgcggggcatcagcagagacaacttcggcaagatcaacgtggaaagcaaggtggtggccccagctctgagaagggccctcgaaaatgccctgatccacagaatccccgacgtgttctttgtggacgaggcccagcactttggcaagatggccagcggctacaagctgcaggatcagctggattgcctgaagtccctggccaacatgaccggcatcctgcactgtctgctgggcacatacgagctgctgaccttcagaaacctgagcggccagctgtctcggagaagcgtggacatccacttcagacggtactgcgccgagaatcccgaagatgtgcaggccttcaagagcgtgctgctgactttccagcagcagatgcctctggccgaggctcctgatctggtgtctcactgggagtacttctacgagagaaccctgggctgcgtgggcatcctgaagaactggctgacaagagccctgaaggacgccctggatagagaagccaccaccgtgacactgaaggacctgcagaaacgcgcttggagcgtggcccagtgccagcggatgttcaaagagatccaagagggcgaaagacagctgagcgagacagagacagacatccagaacctgagatctgccctcggcctgggagccaagcctattgtgctgcctgaggaaacccctaagaccaccagacctccaggcaaagtgggcaaaagaaagcccaagagggaccccatcggagtgcagcaggatgtgtcttgactagcataaccccttggggcgcactcctcaggtgcaggctgcctatcagaaggtggtggctggtgtggccaatgccctggctcacaaataccactgagatctttttccctctgccaaaaattatggggacatcatgaagccccttgagcatctgacttctggctaataaaggaaatttattttcattgcaatagtgtgttggaattttttgtgtctctcactcggaaggacatatgggagggcaaatcatttaaaacatcagaatgagtatttggtttagagtttggcaacatatgcccatatgctggctgccatgaacaaaggttggctataaagaggtcatcagtatatgaaacagccccctgctgtccattccttattccatagaaaagccttgacttgaggttagattttttttatattttgttttgtgttatttttttctttaacatccctaaaattttccttacatgttttactagccagatttttcctcctctcctgactactcccagtcatagctgtccctcttctcttatggagatccctcgacctgcagcccaagcttggcgtaatcatggtcatagctgtttcctgtgtgaaattgttatccgctcacaattccacacaacatacgagccggaagcataaagtgtaaagcctggggtgcctaatgagtgagctaactcacattaattgcgttgcgctcactgcccgctttccagtcgggaaacctgtcgtgccagcggatccgcatctcaattagtcagcaaccatagtcccgcccctaactccgcccatcccgcccctaactccgcccagttccgcccattctccgccccatggctgactaattttttttatttatgcagaggccgaggccgcctcggcctctgagctattccagaagtagtgaggaggcttttttggaggcctaggcttttgcaaaaagctaacttgtttattgcagcttataatggttacaaataaagcaatagcatcacaaatttcacaaataaagcatttttttcactgcattctagttgtggtttgtccaaactcatcaatgtatcttatcatgtctggatccgctgcattaatgaatcggccaacgcgcggggagaggcggtttgcgtattgggcgctcttccgcttcctcgctcactgactcgctgcgctcggtcgttcggctgcggcgagcggtatcagctcactcaaaggcggtaatacggttatccacagaatcaggggataacgcaggaaagaacatgtgagcaaaaggccagcaaaaggccaggaaccgtaaaaaggccgcgttgctggcgtttttccataggctccgcccccctgacgagcatcacaaaaatcgacgctcaagtcagaggtggcgaaacccgacaggactataaagataccaggcgtttccccctggaagctccctcgtgcgctctcctgttccgaccctgccgcttaccggatacctgtccgcctttctcccttcgggaagcgtggcgctttctcatagctcacgctgtaggtatctcagttcggtgtaggtcgttcgctccaagctgggctgtgtgcacgaaccccccgttcagcccgaccgctgcgccttatccggtaactatcgtcttgagtccaacccggtaagacacgacttatcgccactggcagcagccactggtaacaggattagcagagcgaggtatgtaggcggtgctacagagttcttgaagtggtggcctaactacggctacactagaagaacagtatttggtatctgcgctctgctgaagccagttaccttcggaaaaagagttggtagctcttgatccggcaaacaaaccaccgctggtagcggtggtttttttgtttgcaagcagcagattacgcgcagaaaaaaaggatctcaagaagatcctttgatcttttctacggggtctgacgctcagtggaacgaaaactcacgttaagggattttggtcatgagattatcaaaaaggatcttcacctagatccttttaaattaaaaatgaagttttaaatcaatctaaagtatatatgagtaaacttggtctgacagttaccaatgcttaatcagtgaggcacctatctcagcgatctgtctatttcgttcatccatagttgcctgactccccgtcgtgtagataactacgatacgggagggcttaccatctggccccagtgctgcaatgataccgcgagacccacgctcaccggctccagatttatcagcaataaaccagccagccggaagggccgagcgcagaagtggtcctgcaactttatccgcctccatccagtctattaattgttgccgggaagctagagtaagtagttcgccagttaatagtttgcgcaacgttgttgccattgctacaggcatcgtggtgtcacgctcgtcgtttggtatggcttcattcagctccggttcccaacgatcaaggcgagttacatgatcccccatgttgtgcaaaaaagcggttagctccttcggtcctccgatcgttgtcagaagtaagttggccgcagtgttatcactcatggttatggcagcactgcataattctcttactgtcatgccatccgtaagatgcttttctgtgactggtgagtactcaaccaagtcattctgagaatagtgtatgcggcgaccgagttgctcttgcccggcgtcaatacgggataataccgcgccacatagcagaactttaaaagtgctcatcattggaaaacgttcttcggggcgaaaactctcaaggatcttaccgctgttgagatccagttcgatgtaacccactcgtgcacccaactgatcttcagcatcttttactttcaccagcgtttctgggtgagcaaaaacaggaaggcaaaatgccgcaaaaaagggaataagggcgacacggaaatgttgaatactcatactcttcctttttcaatattattgaagcatttatcagggttattgtctcatgagcggatacatatttgaatgtatttagaaaaataaacaaataggggttccgcgcacatttccccgaaaagtgccacctgggtcgacattgattattgactagtaatagtaatcaattacggggtcattagttcatagcccatatatggagttccg

SEQ ID NO: 738 - DNA, 4958 bp, synthetic construct
  misc_feature 1..4958: note = Synthetic
  source 1..4958: mol_type = other DNA
cgttacataacttacggtaaatggcccgcctggctgaccgcccaacgacccccgcccattgacgtcaataatgacgtatgttcccatagtaacgccaatagggactttccattgacgtcaatgggtggagtatttacggtaaactgcccacttggcagtacatcaagtgtatcatatgccaagtacgccccctattgacgtcaatgacggtaaatggcccgcctggcattatgcccagtacatgaccttatgggactttcctacttggcagtacatctacgtattagtcatcgctattaccatggtgatgcggttttggcagtacatcaatgggcgtggatagcggtttgactcacggggatttccaagtctccaccccattgacgtcaatgggagtttgttttggcaccaaaatcaacgggactttccaaaatgtcgtaacaactccgccccattgacgcaaatgggcggtaggcgtgtacggtgggaggtctatataagcagagctggtttagtgaaccgtcagatccgctagcgctaccggactcagatcgccaccatgtacccctacgacgtgccagactacgcccctaagaagaagagaaaagtcggcggctctggcggcggaggatctggcggaggtggaagcggaggaacccagaccaacggcttccctctggaactgctgaccagacctgctcctgagagactggcctacttcgagaactacaccgtgggacaccccagactgaaagaggtgtccgagatcctgatgcggacaatcgctgaacctgccggcgctagcttcatcttcgtgtatggacctagcggcgtgggcaagaccacactgagactgagagtggaacagaaactgaccgagctggtgctgcccctgctggaatctgatagaggcagagtgcctgtcgtgggcgttgaagctgtggcccctgagagcagaaacttcaactggaaggactactacacacgggccctgatcgccctggaagaacctctgatcgaccacaagttcgactacggcgtgcggggcatcagcagagacaacttcggcaagatcaacgtggaaagcaaggtggtggccccagctctgagaagggccctcgaaaatgccctgatccacagactgcccgacgtgttctttgtggacgaggcccagcactttggcaagatggccagcggctacaagctgcaggatcagctggattgcctgaagtccctggccaacatgaccggcatcctgcactgtctgctgggcacatacgagctgctgaccttcagaaacctgagcggccagctgtctcggagaagcgtggacatccacttcagacggtactgcgccgagaatcccgaagatgtgcaggccttcaagagcgtgctgctgactttccagcagcagatgcctctggccgaggctcctgatctggtgtctcactgggagtacttctacgagagaaccctgggctgcgtgggcatcctgaagaactggctgacaagagccctgaaggacgccctggatagagaagccaccaccgtgacactgaaggacctgcagaaacgcgcttggagcgtggcccagtgccagcggatgttcaaagagatccaagagggcgaaagacagctgagcgagacagagacagacatccagaacctgagatctgccctcggcctgggagccaagcctattgtgctgcctgaggaaacccctaagaccaccagacctccaggcaaagtgggcaaaagaaagcccaagagggaccccatcggagtgcagcaggatgtgtcttgactagcataaccccttggggcgcactcctcaggtgcaggctgcctatcagaaggtggtggctggtgtggccaatgccctggctcacaaataccactgagatctttttccctctgccaaaaattatggggacatcatgaagccccttgagcatctgacttctggctaataaaggaaatttattttcattgcaatagtgtgttggaattttttgtgtctctcactcggaaggacatatgggagggcaaatcatttaaaacatcagaatgagtatttggtttagagtttggcaacatatgcccatatgctggctgccatgaacaaaggttggctataaagaggtcatcagtatatgaaacagccccctgctgtccattccttattccatagaaaagccttgacttgaggttagattttttttatattttgttttgtgttatttttttctttaacatccctaaaattttccttacatgttttactagccagatttttcctcctctcctgactactcccagtcatagctgtccctcttctcttatggagatccctcgacctgcagcccaagcttggcgtaatcatggtcatagctgtttcctgtgtgaaattgttatccgctcacaattccacacaacatacgagccggaagcataaagtgtaaagcctggggtgcctaatgagtgagctaactcacattaattgcgttgcgctcactgcccgctttccagtcgggaaacctgtcgtgccagcggatccgcatctcaattagtcagcaaccatagtcccgcccctaactccgcccatcccgcccctaactccgcccagttccgcccattctccgccccatggctgactaattttttttatttatgcagaggccgaggccgcctcggcctctgagctattccagaagtagtgaggaggcttttttggaggcctaggcttttgcaaaaagctaacttgtttattgcagcttataatggttacaaataaagcaatagcatcacaaatttcacaaataaagcatttttttcactgcattctagttgtggtttgtccaaactcatcaatgtatcttatcatgtctggatccgctgcattaatgaatcggccaacgcgcggggagaggcggtttgcgtattgggcgctcttccgcttcctcgctcactgactcgctgcgctcggtcgttcggctgcggcgagcggtatcagctcactcaaaggcggtaatacggttatccacagaatcaggggataacgcaggaaagaacatgtgagcaaaaggccagcaaaaggccaggaaccgtaaaaaggccgcgttgctggcgtttttccataggctccgcccccctgacgagcatcacaaaaatcgacgctcaagtcagaggtggcgaaacccgacaggactataaagataccaggcgtttccccctggaagctccctcgtgcgctctcctgttccgaccctgccgcttaccggatacctgtccgcctttctcccttcgggaagcgtggcgctttctcatagctcacgctgtaggtatctcagttcggtgtaggtcgttcgctccaagctgggctgtgtgcacgaaccccccgttcagcccgaccgctgcgccttatccggtaactatcgtcttgagtccaacccggtaagacacgacttatcgccactggcagcagccactggtaacaggattagcagagcgaggtatgtaggcggtgctacagagttcttgaagtggtggcctaactacggctacactagaagaacagtatttggtatctgcgctctgctgaagccagttaccttcggaaaaagagttggtagctcttgatccggcaaacaaaccaccgctggtagcggtggtttttttgtttgcaagcagcagattacgcgcagaaaaaaaggatctcaagaagatcctttgatcttttctacggggtctgacgctcagtggaacgaaaactcacgttaagggattttggtcatgagattatcaaaaaggatcttcacctagatccttttaaattaaaaatgaagttttaaatcaatctaaagtatatatgagtaaacttggtctgacagttaccaatgcttaatcagtgaggcacctatctcagcgatctgtctatttcgttcatccatagttgcctgactccccgtcgtgtagataactacgatacgggagggcttaccatctggccccagtgctgcaatgataccgcgagacccacgctcaccggctccagatttatcagcaataaaccagccagccggaagggccgagcgcagaagtggtcctgcaactttatccgcctccatccagtctattaattgttgccgggaagctagagtaagtagttcgccagttaatagtttgcgcaacgttgttgccattgctacaggcatcgtggtgtcacgctcgtcgtttggtatggcttcattcagctccggttcccaacgatcaaggcgagttacatgatcccccatgttgtgcaaaaaagcggttagctccttcggtcctccgatcgttgtcagaagtaagttggccgcagtgttatcactcatggttatggcagcactgcataattctcttactgtcatgccatccgtaagatgcttttctgtgactggtgagtactcaaccaagtcattctgagaatagtgtatgcggcgaccgagttgctcttgcccggcgtcaatacgggataataccgcgccacatagcagaactttaaaagtgctcatcattggaaaacgttcttcggggcgaaaactctcaaggatcttaccgctgttgagatccagttcgatgtaacccactcgtgcacccaactgatcttcagcatcttttactttcaccagcgtttctgggtgagcaaaaacaggaaggcaaaatgccgcaaaaaagggaataagggcgacacggaaatgttgaatactcatactcttcctttttcaatattattgaagcatttatcagggttattgtctcatgagcggatacatatttgaatgtatttagaaaaataaacaaataggggttccgcgcacatttccccgaaaagtgccacctgggtcgacattgattattgactagtaatagtaatcaattacggggtcattagttcatagcccatatatggagttccg

SEQ ID NO: 739 - DNA, 4958 bp, synthetic construct
  misc_feature 1..4958: note = Synthetic
  source 1..4958: mol_type = other DNA
cgttacataacttacggtaaatggcccgcctggctgaccgcccaacgacccccgcccattgacgtcaataatgacgtatgttcccatagtaacgccaatagggactttccattgacgtcaatgggtggagtatttacggtaaactgcccacttggcagtacatcaagtgtatcatatgccaagtacgccccctattgacgtcaatgacggtaaatggcccgcctggcattatgcccagtacatgaccttatgggactttcctacttggcagtacatctacgtattagtcatcgctattaccatggtgatgcggttttggcagtacatcaatgggcgtggatagcggtttgactcacggggatttccaagtctccaccccattgacgtcaatgggagtttgttttggcaccaaaatcaacgggactttccaaaatgtcgtaacaactccgccccattgacgcaaatgggcggtaggcgtgtacggtgggaggtctatataagcagagctggtttagtgaaccgtcagatccgctagcgctaccggactcagatcgccaccatgtacccctacgacgtgccagactacgcccctaagaagaagagaaaagtcggcggctctggcggcggaggatctggcggaggtggaagcggaggaacccagaccaacggcttccctctggaactgctgaccagacctgctcctgagagactggcctacttcgagaactacaccgtgggacaccccagactgaaagaggtgtccgagatcctgatgcggacaatcgctgaacctgccggcgctagcttcatcttcgtgtatggacctagcggcgtgggcaagaccacactgagactgagagtggaacagaaactgaccgagctggtgctgcccctgctggaatctgatagaggcagagtgcctgtcgtgggcgttgaagctgtggcccctgagagcagaaacttcaactggaaggactactacacacgggccctgatcgccctggaagaacctctgatcgaccacaagttcgactacggcgtgcggggcatcagcagagacaacttcggcaagatcaacgtggaaagcaaggtggtggccccagctctgagaagggccctcgaaaatgccctgatccacagagtgcccgacgtgttctttgtggacgaggcccagcactttggcaagatggccagcggctacaagctgcaggatcagctggattgcctgaagtccctggccaacatgaccggcatcctgcactgtctgctgggcacatacgagctgctgaccttcagaaacctgagcggccagctgtctcggagaagcgtggacatccacttcagacggtactgcgccgagaatcccgaagatgtgcaggccttcaagagcgtgctgctgactttccagcagcagatgcctctggccgaggctcctgatctggtgtctcactgggagtacttctacgagagaaccctgggctgcgtgggcatcctgaagaactggctgacaagagccctgaaggacgccctggatagagaagccaccaccgtgacactgaaggacctgcagaaacgcgcttggagcgtggcccagtgccagcggatgttcaaagagatccaagagggcgaaagacagctgagcgagacagagacagacatccagaacctgagatctgccctcggcctgggagccaagcctattgtgctgcctgaggaaacccctaagaccaccagacctccaggcaaagtgggcaaaagaaagcccaagagggaccccatcggagtgcagcaggatgtgtcttgactagcataaccccttggggcgcactcctcaggtgcaggctgcctatcagaaggtggtggctggtgtggccaatgccctggctcacaaataccactgagatctttttccctctgccaaaaattatggggacatcatgaagccccttgagcatctgacttctggctaataaaggaaatttattttcattgcaatagtgtgttggaattttttgtgtctctcactcggaaggacatatgggagggcaaatcatttaaaacatcagaatgagtatttggtttagagtttggcaacatatgcccatatgctggctgccatgaacaaaggttggctataaagaggtcatcagtatatgaaacagccccctgctgtccattccttattccatagaaaagccttgacttgaggttagattttttttatattttgttttgtgttatttttttctttaacatccctaaaattttccttacatgttttactagccagatttttcctcctctcctgactactcccagtcatagctgtccctcttctcttatggagatccctcgacctgcagcccaagcttggcgtaatcatggtcatagctgtttcctgtgtgaaattgttatccgctcacaattccacacaacatacgagccggaagcataaagtgtaaagcctggggtgcctaatgagtgagctaactcacattaattgcgttgcgctcactgcccgctttccagtcgggaaacctgtcgtgccagcggatccgcatctcaattagtcagcaaccatagtcccgcccctaactccgcccatcccgcccctaactccgcccagttccgcccattctccgccccatggctgactaattttttttatttatgcagaggccgaggccgcctcggcctctgagctattccagaagtagtgaggaggcttttttggaggcctaggcttttgcaaaaagctaacttgtttattgcagcttataatggttacaaataaagcaatagcatcacaaatttcacaaataaagcatttttttcactgcattctagttgtggtttgtccaaactcatcaatgtatcttatcatgtctggatccgctgcattaatgaatcggccaacgcgcggggagaggcggtttgcgtattgggcgctcttccgcttcctcgctcactgactcgctgcgctcggtcgttcggctgcggcgagcggtatcagctcactcaaaggcggtaatacggttatccacagaatcaggggataacgcaggaaagaacatgtgagcaaaaggccagcaaaaggccaggaaccgtaaaaaggccgcgttgctggcgtttttccataggctccgcccccctgacgagcatcacaaaaatcgacgctcaagtcagaggtggcgaaacccgacaggactataaagataccaggcgtttccccctggaagctccctcgtgcgctctcctgttccgaccctgccgcttaccggatacctgtccgcctttctcccttcgggaagcgtggcgctttctcatagctcacgctgtaggtatctcagttcggtgtaggtcgttcgctccaagctgggctgtgtgcacgaaccccccgttcagcccgaccgctgcgccttatccggtaactatcgtcttgagtccaacccggtaagacacgacttatcgccactggcagcagccactggtaacaggattagcagagcgaggtatgtaggcggtgctacagagttcttgaagtggtggcctaactacggctacactagaagaacagtatttggtatctgcgctctgctgaagccagttaccttcggaaaaagagttggtagctcttgatccggcaaacaaaccaccgctggtagcggtggtttttttgtttgcaagcagcagattacgcgcagaaaaaaaggatctcaagaagatcctttgatcttttctacggggtctgacgctcagtggaacgaaaactcacgttaagggattttggtcatgagattatcaaaaaggatcttcacctagatccttttaaattaaaaatgaagttttaaatcaatctaaagtatatatgagtaaacttggtctgacagttaccaatgcttaatcagtgaggcacctatctcagcgatctgtctatttcgttcatccatagttgcctgactccccgtcgtgtagataactacgatacgggagggcttaccatctggccccagtgctgcaatgataccgcgagacccacgctcaccggctccagatttatcagcaataaaccagccagccggaagggccgagcgcagaagtggtcctgcaactttatccgcctccatccagtctattaattgttgccgggaagctagagtaagtagttcgccagttaatagtttgcgcaacgttgttgccattgctacaggcatcgtggtgtcacgctcgtcgtttggtatggcttcattcagctccggttcccaacgatcaaggcgagttacatgatcccccatgttgtgcaaaaaagcggttagctccttcggtcctccgatcgttgtcagaagtaagttggccgcagtgttatcactcatggttatggcagcactgcataattctcttactgtcatgccatccgtaagatgcttttctgtgactggtgagtactcaaccaagtcattctgagaatagtgtatgcggcgaccgagttgctcttgcccggcgtcaatacgggataataccgcgccacatagcagaactttaaaagtgctcatcattggaaaacgttcttcggggcgaaaactctcaaggatcttaccgctgttgagatccagttcgatgtaacccactcgtgcacccaactgatcttcagcatcttttactttcaccagcgtttctgggtgagcaaaaacaggaaggcaaaatgccgcaaaaaagggaataagggcgacacggaaatgttgaatactcatactcttcctttttcaatattattgaagcatttatcagggttattgtctcatgagcggatacatatttgaatgtatttagaaaaataaacaaataggggttccgcgcacatttccccgaaaagtgccacctgggtcgacattgattattgactagtaatagtaatcaattacggggtcattagttcatagcccatatatggagttccg

SEQ ID NO: 740 - DNA, 4958 bp, synthetic construct
  misc_feature 1..4958: note = Synthetic
  source 1..4958: mol_type = other DNA
cgttacataacttacggtaaatggcccgcctggctgaccgcccaacgacccccgcccattgacgtcaataatgacgtatgttcccatagtaacgccaatagggactttccattgacgtcaatgggtggagtatttacggtaaactgcccacttggcagtacatcaagtgtatcatatgccaagtacgccccctattgacgtcaatgacggtaaatggcccgcctggcattatgcccagtacatgaccttatgggactttcctacttggcagtacatctacgtattagtcatcgctattaccatggtgatgcggttttggcagtacatcaatgggcgtggatagcggtttgactcacggggatttccaagtctccaccccattgacgtcaatgggagtttgttttggcaccaaaatcaacgggactttccaaaatgtcgtaacaactccgccccattgacgcaaatgggcggtaggcgtgtacggtgggaggtctatataagcagagctggtttagtgaaccgtcagatccgctagcgctaccggactcagatcgccaccatgtacccctacgacgtgccagactacgcccctaagaagaagagaaaagtcggcggctctggcggcggaggatctggcggaggtggaagcggaggaacccagaccaacggcttccctctggaactgctgaccagacctgctcctgagagactggcctacttcgagaactacaccgtgggacaccccagactgaaagaggtgtccgagatcctgatgcggacaatcgctgaacctgccggcgctagcttcatcttcgtgtatggacctagcggcgtgggcaagaccacactgagactgagagtggaacagaaactgaccgagctggtgctgcccctgctggaatctgatagaggcagagtgcctgtcgtgggcgttgaagctgtggcccctgagagcagaaacttcaactggaaggactactacacacgggccctgatcgccctggaagaacctctgatcgaccacaagttcgactacggcgtgcggggcatcagcagagacaacttcggcaagatcaacgtggaaagcaaggtggtggccccagctctgagaagggccctcgaaaatgccctgatccacagatggcccgacgtgttctttgtggacgaggcccagcactttggcaagatggccagcggctacaagctgcaggatcagctggattgcctgaagtccctggccaacatgaccggcatcctgcactgtctgctgggcacatacgagctgctgaccttcagaaacctgagcggccagctgtctcggagaagcgtggacatccacttcagacggtactgcgccgagaatcccgaagatgtgcaggccttcaagagcgtgctgctgactttccagcagcagatgcctctggccgaggctcctgatctggtgtctcactgggagtacttctacgagagaaccctgggctgcgtgggcatcctgaagaactggctgacaagagccctgaaggacgccctggatagagaagccaccaccgtgacactgaaggacctgcagaaacgcgcttggagcgtggcccagtgccagcggatgttcaaagagatccaagagggcgaaagacagctgagcgagacagagacagacatccagaacctgagatctgccctcggcctgggagccaagcctattgtgctgcctgaggaaacccctaagaccaccagacctccaggcaaagtgggcaaaagaaagcccaagagggaccccatcggagtgcagcaggatgtgtcttgactagcataaccccttggggcgcactcctcaggtgcaggctgcctatcagaaggtggtggctggtgtggccaatgccctggctcacaaataccactgagatctttttccctctgccaaaaattatggggacatcatgaagccccttgagcatctgacttctggctaataaaggaaatttattttcattgcaatagtgtgttggaattttttgtgtctctcactcggaaggacatatgggagggcaaatcatttaaaacatcagaatgagtatttggtttagagtttggcaacatatgcccatatgctggctgccatgaacaaaggttggctataaagaggtcatcagtatatgaaacagccccctgctgtccattccttattccatagaaaagccttgacttgaggttagattttttttatattttgttttgtgttatttttttctttaacatccctaaaattttccttacatgttttactagccagatttttcctcctctcctgactactcccagtcatagctgtccctcttctcttatggagatccctcgacctgcagcccaagcttggcgtaatcatggtcatagctgtttcctgtgtgaaattgttatccgctcacaattccacacaacatacgagccggaagcataaagtgtaaagcctggggtgcctaatgagtgagctaactcacattaattgcgttgcgctcactgcccgctttccagtcgggaaacctgtcgtgccagcggatccgcatctcaattagtcagcaaccatagtcccgcccctaactccgcccatcccgcccctaactccgcccagttccgcccattctccgccccatggctgactaattttttttatttatgcagaggccgaggccgcctcggcctctgagctattccagaagtagtgaggaggcttttttggaggcctaggcttttgcaaaaagctaacttgtttattgcagcttataatggttacaaataaagcaatagcatcacaaatttcacaaataaagcatttttttcactgcattctagttgtggtttgtccaaactcatcaatgtatcttatcatgtctggatccgctgcattaatgaatcggccaacgcgcggggagaggcggtttgcgtattgggcgctcttccgcttcctcgctcactgactcgctgcgctcggtcgttcggctgcggcgagcggtatcagctcactcaaaggcggtaatacggttatccacagaatcaggggataacgcaggaaagaacatgtgagcaaaaggccagcaaaaggccaggaaccgtaaaaaggccgcgttgctggcgtttttccataggctccgcccccctgacgagcatcacaaaaatcgacgctcaagtcagaggtggcgaaacccgacaggactataaagataccaggcgtttccccctggaagctccctcgtgcgctctcctgttccgaccctgccgcttaccggatacctgtccgcctttctcccttcgggaagcgtggcgctttctcatagctcacgctgtaggtatctcagttcggtgtaggtcgttcgctccaagctgggctgtgtgcacgaaccccccgttcagcccgaccgctgcgccttatccggtaactatcgtcttgagtccaacccggtaagacacgacttatcgccactggcagcagccactggtaacaggattagcagagcgaggtatgtaggcggtgctacagagttcttgaagtggtggcctaactacggctacactagaagaacagtatttggtatctgcgctctgctgaagccagttaccttcggaaaaagagttggtagctcttgatccggcaaacaaaccaccgctggtagcggtggtttttttgtttgcaagcagcagattacgcgcagaaaaaaaggatctcaagaagatcctttgatcttttctacggggtctgacgctcagtggaacgaaaactcacgttaagggattttggtcatgagattatcaaaaaggatcttcacctagatccttttaaattaaaaatgaagttttaaatcaatctaaagtatatatgagtaaacttggtctgacagttaccaatgcttaatcagtgaggcacctatctcagcgatctgtctatttcgttcatccatagttgcctgactccccgtcgtgtagataactacgatacgggagggcttaccatctggccccagtgctgcaatgataccgcgagacccacgctcaccggctccagatttatcagcaataaaccagccagccggaagggccgagcgcagaagtggtcctgcaactttatccgcctccatccagtctattaattgttgccgggaagctagagtaagtagttcgccagttaatagtttgcgcaacgttgttgccattgctacaggcatcgtggtgtcacgctcgtcgtttggtatggcttcattcagctccggttcccaacgatcaaggcgagttacatgatcccccatgttgtgcaaaaaagcggttagctccttcggtcctccgatcgttgtcagaagtaagttggccgcagtgttatcactcatggttatggcagcactgcataattctcttactgtcatgccatccgtaagatgcttttctgtgactggtgagtactcaaccaagtcattctgagaatagtgtatgcggcgaccgagttgctcttgcccggcgtcaatacgggataataccgcgccacatagcagaactttaaaagtgctcatcattggaaaacgttcttcggggcgaaaactctcaaggatcttaccgctgttgagatccagttcgatgtaacccactcgtgcacccaactgatcttcagcatcttttactttcaccagcgtttctgggtgagcaaaaacaggaaggcaaaatgccgcaaaaaagggaataagggcgacacggaaatgttgaatactcatactcttcctttttcaatattattgaagcatttatcagggttattgtctcatgagcggatacatatttgaatgtatttagaaaaataaacaaataggggttccgcgcacatttccccgaaaagtgccacctgggtcgacattgattattgactagtaatagtaatcaattacggggtcattagttcatagcccatatatggagttccg

SEQ ID NO: 741 - DNA, 4133 bp, synthetic construct
  misc_feature 1..4133: note = Synthetic
  variation 1736..1741: note = n is a, c, g, or t
  source 1..4133: mol_type = other DNA
tcgcgcgtttcggtgatgacggtgaaaacctctgacacatgcagctcccggagacggtcacagcttgtctgtaagcggatgccgggagcagacaagcccgtcagggcgcgtcagcgggtgttggcgggtgtcggggctggcttaactatgcggcatcagagcagattgtactgagagtgcaccatatgcggtgtgaaataccgcacagatgcgtaaggagaaaataccgcatcaggcgccattcgccattcaggctgcgcaactgttgggaagggcgatcggtgcgggcctcttcgctattacgccagctggcgaaagggggatgtgctgcaaggcgattaagttgggtaacgccagggttttcccagtcacgacgttgtaaaacgacggccagtgaattgacgcgtattgggataatcgttaccacaagtatctagcgcgcctaaaacgcaacaaccacaggatgaagttgcaccagtgccagattatatcaaacaacagatggaagatttaaaacacaagctaaaccttgataaattgcgacttcacccataagcttgccgctactggaaccataactttgccgtcaacaacactaaaactctcattcttgcgtcagctaattttggatgtaattaacagtttggaaccataaatttgccgccagtccaaattggaaggataagcttgccgtgagtccaagcaagcatagaaagcaggaaagcgcgggattttttgagaatggagcaaaagcggggatcctaggtcttgaaaggagtgggaattggctccggtgcccgtcagtgggcagagcgcacatcgcccacagtccccgagaagttggggggaggggtcggcaattgatccggtgcctagagaaggtggcgcggggtaaactgggaaagtgatgtcgtgtactggctccgcctttttcccgagggtgggggagaaccgtatataagtgcagtagtcgccgtgaacgttctttttcgcaacgggtttgccgccagaacacaggaccggttctagagcgctgccaccatgaccgagtacaagcccacggtgcgcctcgccacccgcgacgacgtccccagggccgtacgcaccctcgccgccgcgttcgccgactaccccgccacgcgccacaccgtcgatccggaccgccacatcgagcgggtcaccgagctgcaagaactcttcctcacgcgcgtcgggctcgacatcggcaaggtgtgggtcgcggacgacggcgccgcggtggcggtctggaccacgccggagagcgtcgaagcgggggcggtgttcgccgagatcggcccgcgcatggccgagttgagcggttcccggctggccgcgcagcaacagatggaaggcctcctggcgccgcaccggcccaaggagcccgcgtggttcctggccaccgtcggcgtctcgcccgaccaccagggcaagggtctgggcagcgccgtcgtgctccccggagtggaggcggccgagcgcgccggggtgcccgccttcctggagacctccgcgccccgcaacctccccttctacgagcggctcggcttcaccgtcaccgccgacgtcgaggtgcccgaaggaccgcgcacctggtgcatgacccgcaagcccggtgcctgattctaaataaaggaaatttattttcattgcaatagtgtgttggaattttttgtgtctctcagagtcagctataaacttaaaaagggtagacttannnnnnttctttctctacatatggaaaattggaagcataactttgccgccctctattggaaccataagcttgccgttgcggcaaagttatgggtaaagtcacataaataattttagtcactctaccaatagcaaatcccaatggcgcgccgagcttggcgtaatcatggtcatagctgtttcctgtgtgaaattgttatccgctcacaattccacacaacatacgagccggaagcataaagtgtaaagcctggggtgcctaatgagtgagctaactcacattaattgcgttgcgctcactgcccgctttccagtcgggaaacctgtcgtgccagctgcattaatgaatcggccaacgcgcggggagaggcggtttgcgtattgggcgctcttccgcttcctcgctcactgactcgctgcgctcggtcgttcggctgcggcgagcggtatcagctcactcaaaggcggtaatacggttatccacagaatcaggggataacgcaggaaagaacatgtgagcaaaaggccagcaaaaggccaggaaccgtaaaaaggccgcgttgctggcgtttttccataggctccgcccccctgacgagcatcacaaaatcacaaaaatcgacgctcaagtcagaggtggcgaaacccgacaggactataaagataccaggcgtttccccctggaagctccctcgtgcgctctcctgttccgaccctgccgcttaccggatacctgtccgcctttctcccttcgggaagcgtggcgctttctcatagctcacgctgtaggtatctcagttcggtgtaggtcgttcgctccaagctgggctgtgtgcacgaaccccccgttcagcccgaccgctgcgccttatccggtaactatcgtcttgagtccaacccggtaagacacgacttatcgccactggcagcagccactggtaacaggattagcagagcgaggtatgtaggcggtgctacagagttcttgaagtggtggcctaactacggctacactagaagaacagtatttggtatctgcgctctgctgaagccagttaccttcggaaaaagagttggtagctcttgatccggcaaacaaaccaccgctggtagcggtggtttttttgtttgcaagcagcagattacgcgcagaaaaaaaggatctcaagaagatcctttgatcttttctacggggtctgacgctcagtggaacgaaaactcacgttaagggattttggtcatgagattatcaaaaaggatcttcacctagatccttttaaattaaaaatgaagttttaaatcaatctaaagtatatatgagtaaacttggtctgacagttaccaatgcttaatcagtgaggcacctatctcagcgatctgtctatttcgttcatccatagttgcctgactccccgtcgtgtagataactacgatacgggagggcttaccatctggccccagtgctgcaatgataccgcgagacccacgctcaccggctccagatttatcagcaataaaccagccagccggaagggccgagcgcagaagtggtcctgcaactttatccgcctccatccagtctattaattgttgccgggaagctagagtaagtagttcgccagttaatagtttgcgcaacgttgttgccattgctacaggcatcgtggtgtcacgctcgtcgtttggtatggcttcattcagctccggttcccaacgatcaaggcgagttacatgatcccccatgttgtgcaaaaaagcggttagctccttcggtcctccgatcgttgtcagaagtaagttggccgcagtgttatcactcatggttatggcagcactgcataattctcttactgtcatgccatccgtaagatgcttttctgtgactggtgagtactcaaccaagtcattctgagaatagtgtatgcggcgaccgagttgctcttgcccggcgtcaatacgggataataccgcgccacatagcagaactttaaaagtgctcatcattggaaaacgttcttcggggcgaaaactctcaaggatcttaccgctgttgagatccagttcgatgtaacccactcgtgcacccaactgatcttcagcatcttttactttcaccagcgtttctgggtgagcaaaaacaggaaggcaaaatgccgcaaaaaagggaataagggcgacacggaaatgttgaatactcatactcttcctttttcaatattattgaagcatttatcagggttattgtctcatgagcggatacatatttgaatgtatttagaaaaataaacaaataggggttccgcgcacatttccccgaaaagtgccacctgacgtctaagaaaccattattatcatgacattaacctataaaaataggcgtatcacgaggccctttcgtc

SEQ ID NO: 742 - DNA, 3003 bp, synthetic construct
  misc_feature 1..3003: note = Synthetic
  source 1..3003: mol_type = other DNA
aattctgtggaatgtgtgtcagttagggtgtggaaagtccccaggctccccagcaggcagaagtatgcaaagcatgcatctcaattagtcagcaaccaggtgtggaaagtccccaggctccccagcaggcagaagtatgcaaagcatgcatctcaattagtcagcaaccatagtcccgcccctaactccgcccatcccgcccctaactccgcccagttccgcccattctccgccccatggctgactaattttttttatttatgcagaggccgaggccgcctctgcctctgagctattccagaagtagtgaggaggcttttttggaggcctaggcttttgcaaaaagctaacttgtttattgcagcttataatggttacaaataaagcaatagcatcacaaatttcacaaataaagcatttttttcactgcattctagttgtggtttgtccaaactcatcaatgtatcttatcatgtctgtataccgtcgacctctagctagagcttggcgtaatcatggtcatagctgtttcctgtgtgaaattgttatccgctcacaattccacacaacatacgagccggaagcataaagtgtaaagcctggggtgcctaatgagtgagctaactcacattaattgcgttgcgctcactgcccgctttccagtcgggaaacctgtcgtgccagctgcattaatgaatcggccaacgcgcggggagaggcggtttgcgtattgggcgctcttccgcttcctcgctcactgactcgctgcgctcggtcgttcggctgcggcgagcggtatcagctcactcaaaggcggtaatacggttatccacagaatcaggggataacgcaggaaagaacatgtgagcaaaaggccagcaaaaggccaggaaccgtaaaaaggccgcgttgctggcgtttttccataggctccgcccccctgacgagcatcacaaaaatcgacgctcaagtcagaggtggcgaaacccgacaggactataaagataccaggcgtttccccctggaagctccctcgtgcgctctcctgttccgaccctgccgcttaccggatacctgtccgcctttctcccttcgggaagcgtggcgctttctcatagctcacgctgtaggtatctcagttcggtgtaggtcgttcgctccaagctgggctgtgtgcacgaaccccccgttcagcccgaccgctgcgccttatccggtaactatcgtcttgagtccaacccggtaagacacgacttatcgccactggcagcagccactggtaacaggattagcagagcgaggtatgtaggcggtgctacagagttcttgaagtggtggcctaactacggctacactagaagaacagtatttggtatctgcgctctgctgaagccagttaccttcggaaaaagagttggtagctcttgatccggcaaacaaaccaccgctggtagcggtttttttgtttgcaagcagcagattacgcgcagaaaaaaaggatctcaagaagatcctttgatcttttctacggggtctgacgctcagtggaacgaaaactcacgttaagggattttggtcatgagattatcaaaaaggatcttcacctagatccttttaaattaaaaatgaagttttaaatcaatctaaagtatatatgagtaaacttggtctgacagttaccaatgcttaatcagtgaggcacctatctcagcgatctgtctatttcgttcatccatagttgcctgactccccgtcgtgtagataactacgatacgggagggcttaccatctggccccagtgctgcaatgataccgcgagacccacgctcaccggctccagatttatcagcaataaaccagccagccggaagggccgagcgcagaagtggtcctgcaactttatccgcctccatccagtctattaattgttgccgggaagctagagtaagtagttcgccagttaatagtttgcgcaacgttgttgccattgctacaggcatcgtggtgtcacgctcgtcgtttggtatggcttcattcagctccggttcccaacgatcaaggcgagttacatgatcccccatgttgtgcaaaaaagcggttagctccttcggtcctccgatcgttgtcagaagtaagttggccgcagtgttatcactcatggttatggcagcactgcataattctcttactgtcatgccatccgtaagatgcttttctgtgactggtgagtactcaaccaagtcattctgagaatagtgtatgcggcgaccgagttgctcttgcccggcgtcaatacgggataataccgcgccacatagcagaactttaaaagtgctcatcattggaaaacgttcttcggggcgaaaactctcaaggatcttaccgctgttgagatccagttcgatgtaacccactcgtgcacccaactgatcttcagcatcttttactttcaccagcgtttctgggtgagcaaaaacaggaaggcaaaatgccgcaaaaaagggaataagggcgacacggaaatgttgaatactcatactcttcctttttcaatattattgaagcatttatcagggttattgtctcatgagcggatacatatttgaatgtatttagaaaaataaacaaataggggttccgcgcacatttccccgaaaagtgccacctgagggcctatttcccatgattccttcatatttgcatatacgatacaaggctgttagagagataattagaattaatttgactgtaaacacaaagatattagtacaaaatacgtgacgtagaaagtaataatttcttgggtagtttgcagttttaaaattatgttttaaaatggactatcatatgcttaccgtaacttgaaagtatttcgatttcttggctttatatatcttgtggaaaggacgtgattcgtggcttgatgccgttaggcgttgctcaaagtcttctctgaagacagtgattcgtggcttgatgccgttaggcgttgctcaatttttt

SEQ ID NO: 743 - DNA, 3022 bp, synthetic construct
  misc_feature 1..3022: note = Synthetic
  source 1..3022: mol_type = other DNA
aattctgtggaatgtgtgtcagttagggtgtggaaagtccccaggctccccagcaggcagaagtatgcaaagcatgcatctcaattagtcagcaaccaggtgtggaaagtccccaggctccccagcaggcagaagtatgcaaagcatgcatctcaattagtcagcaaccatagtcccgcccctaactccgcccatcccgcccctaactccgcccagttccgcccattctccgccccatggctgactaattttttttatttatgcagaggccgaggccgcctctgcctctgagctattccagaagtagtgaggaggcttttttggaggcctaggcttttgcaaaaagctaacttgtttattgcagcttataatggttacaaataaagcaatagcatcacaaatttcacaaataaagcatttttttcactgcattctagttgtggtttgtccaaactcatcaatgtatcttatcatgtctgtataccgtcgacctctagctagagcttggcgtaatcatggtcatagctgtttcctgtgtgaaattgttatccgctcacaattccacacaacatacgagccggaagcataaagtgtaaagcctggggtgcctaatgagtgagctaactcacattaattgcgttgcgctcactgcccgctttccagtcgggaaacctgtcgtgccagctgcattaatgaatcggccaacgcgcggggagaggcggtttgcgtattgggcgctcttccgcttcctcgctcactgactcgctgcgctcggtcgttcggctgcggcgagcggtatcagctcactcaaaggcggtaatacggttatccacagaatcaggggataacgcaggaaagaacatgtgagcaaaaggccagcaaaaggccaggaaccgtaaaaaggccgcgttgctggcgtttttccataggctccgcccccctgacgagcatcacaaaaatcgacgctcaagtcagaggtggcgaaacccgacaggactataaagataccaggcgtttccccctggaagctccctcgtgcgctctcctgttccgaccctgccgcttaccggatacctgtccgcctttctcccttcgggaagcgtggcgctttctcatagctcacgctgtaggtatctcagttcggtgtaggtcgttcgctccaagctgggctgtgtgcacgaaccccccgttcagcccgaccgctgcgccttatccggtaactatcgtcttgagtccaacccggtaagacacgacttatcgccactggcagcagccactggtaacaggattagcagagcgaggtatgtaggcggtgctacagagttcttgaagtggtggcctaactacggctacactagaagaacagtatttggtatctgcgctctgctgaagccagttaccttcggaaaaagagttggtagctcttgatccggcaaacaaaccaccgctggtagcggtttttttgtttgcaagcagcagattacgcgcagaaaaaaaggatctcaagaagatcctttgatcttttctacggggtctgacgctcagtggaacgaaaactcacgttaagggattttggtcatgagattatcaaaaaggatcttcacctagatccttttaaattaaaaatgaagttttaaatcaatctaaagtatatatgagtaaacttggtctgacagttaccaatgcttaatcagtgaggcacctatctcagcgatctgtctatttcgttcatccatagttgcctgactccccgtcgtgtagataactacgatacgggagggcttaccatctggccccagtgctgcaatgataccgcgagacccacgctcaccggctccagatttatcagcaataaaccagccagccggaagggccgagcgcagaagtggtcctgcaactttatccgcctccatccagtctattaattgttgccgggaagctagagtaagtagttcgccagttaatagtttgcgcaacgttgttgccattgctacaggcatcgtggtgtcacgctcgtcgtttggtatggcttcattcagctccggttcccaacgatcaaggcgagttacatgatcccccatgttgtgcaaaaaagcggttagctccttcggtcctccgatcgttgtcagaagtaagttggccgcagtgttatcactcatggttatggcagcactgcataattctcttactgtcatgccatccgtaagatgcttttctgtgactggtgagtactcaaccaagtcattctgagaatagtgtatgcggcgaccgagttgctcttgcccggcgtcaatacgggataataccgcgccacatagcagaactttaaaagtgctcatcattggaaaacgttcttcggggcgaaaactctcaaggatcttaccgctgttgagatccagttcgatgtaacccactcgtgcacccaactgatcttcagcatcttttactttcaccagcgtttctgggtgagcaaaaacaggaaggcaaaatgccgcaaaaaagggaataagggcgacacggaaatgttgaatactcatactcttcctttttcaatattattgaagcatttatcagggttattgtctcatgagcggatacatatttgaatgtatttagaaaaataaacaaataggggttccgcgcacatttccccgaaaagtgccacctgagggcctatttcccatgattccttcatatttgcatatacgatacaaggctgttagagagataattagaattaatttgactgtaaacacaaagatattagtacaaaatacgtgacgtagaaagtaataatttcttgggtagtttgcagttttaaaattatgttttaaaatggactatcatatgcttaccgtaacttgaaagtatttcgatttcttggctttatatatcttgtggaaaggacgtgattcgtggcttgatgccgttaggcgttgctcaaggtggatggcctaattcctttttcttcagaactgtggtgattcgtggcttgatgccgttaggcgttgctcaatttttt

SEQ ID NO: 744 - DNA, 3022 bp, synthetic construct
  misc_feature 1..3022: note = Synthetic
  source 1..3022: mol_type = other DNA
aattctgtggaatgtgtgtcagttagggtgtggaaagtccccaggctccccagcaggcagaagtatgcaaagcatgcatctcaattagtcagcaaccaggtgtggaaagtccccaggctccccagcaggcagaagtatgcaaagcatgcatctcaattagtcagcaaccatagtcccgcccctaactccgcccatcccgcccctaactccgcccagttccgcccattctccgccccatggctgactaattttttttatttatgcagaggccgaggccgcctctgcctctgagctattccagaagtagtgaggaggcttttttggaggcctaggcttttgcaaaaagctaacttgtttattgcagcttataatggttacaaataaagcaatagcatcacaaatttcacaaataaagcatttttttcactgcattctagttgtggtttgtccaaactcatcaatgtatcttatcatgtctgtataccgtcgacctctagctagagcttggcgtaatcatggtcatagctgtttcctgtgtgaaattgttatccgctcacaattccacacaacatacgagccggaagcataaagtgtaaagcctggggtgcctaatgagtgagctaactcacattaattgcgttgcgctcactgcccgctttccagtcgggaaacctgtcgtgccagctgcattaatgaatcggccaacgcgcggggagaggcggtttgcgtattgggcgctcttccgcttcctcgctcactgactcgctgcgctcggtcgttcggctgcggcgagcggtatcagctcactcaaaggcggtaatacggttatccacagaatcaggggataacgcaggaaagaacatgtgagcaaaaggccagcaaaaggccaggaaccgtaaaaaggccgcgttgctggcgtttttccataggctccgcccccctgacgagcatcacaaaaatcgacgctcaagtcagaggtggcgaaacccgacaggactataaagataccaggcgtttccccctggaagctccctcgtgcgctctcctgttccgaccctgccgcttaccggatacctgtccgcctttctcccttcgggaagcgtggcgctttctcatagctcacgctgtaggtatctcagttcggtgtaggtcgttcgctccaagctgggctgtgtgcacgaaccccccgttcagcccgaccgctgcgccttatccggtaactatcgtcttgagtccaacccggtaagacacgacttatcgccactggcagcagccactggtaacaggattagcagagcgaggtatgtaggcggtgctacagagttcttgaagtggtggcctaactacggctacactagaagaacagtatttggtatctgcgctctgctgaagccagttaccttcggaaaaagagttggtagctcttgatccggcaaacaaaccaccgctggtagcggtttttttgtttgcaagcagcagattacgcgcagaaaaaaaggatctcaagaagatcctttgatcttttctacggggtctgacgctcagtggaacgaaaactcacgttaagggattttggtcatgagattatcaaaaaggatcttcacctagatccttttaaattaaaaatgaagttttaaatcaatctaaagtatatatgagtaaacttggtctgacagttaccaatgcttaatcagtgaggcacctatctcagcgatctgtctatttcgttcatccatagttgcctgactccccgtcgtgtagataactacgatacgggagggcttaccatctggccccagtgctgcaatgataccgcgagacccacgctcaccggctccagatttatcagcaataaaccagccagccggaagggccgagcgcagaagtggtcctgcaactttatccgcctccatccagtctattaattgttgccgggaagctagagtaagtagttcgccagttaatagtttgcgcaacgttgttgccattgctacaggcatcgtggtgtcacgctcgtcgtttggtatggcttcattcagctccggttcccaacgatcaaggcgagttacatgatcccccatgttgtgcaaaaaagcggttagctccttcggtcctccgatcgttgtcagaagtaagttggccgcagtgttatcactcatggttatggcagcactgcataattctcttactgtcatgccatccgtaagatgcttttctgtgactggtgagtactcaaccaagtcattctgagaatagtgtatgcggcgaccgagttgctcttgcccggcgtcaatacgggataataccgcgccacatagcagaactttaaaagtgctcatcattggaaaacgttcttcggggcgaaaactctcaaggatcttaccgctgttgagatccagttcgatgtaacccactcgtgcacccaactgatcttcagcatcttttactttcaccagcgtttctgggtgagcaaaaacaggaaggcaaaatgccgcaaaaaagggaataagggcgacacggaaatgttgaatactcatactcttcctttttcaatattattgaagcatttatcagggttattgtctcatgagcggatacatatttgaatgtatttagaaaaataaacaaataggggttccgcgcacatttccccgaaaagtgccacctgagggcctatttcccatgattccttcatatttgcatatacgatacaaggctgttagagagataattagaattaatttgactgtaaacacaaagatattagtacaaaatacgtgacgtagaaagtaataatttcttgggtagtttgcagttttaaaattatgttttaaaatggactatcatatgcttaccgtaacttgaaagtatttcgatttcttggctttatatatcttgtggaaaggacgtgattcgtggcttgatgccgttaggcgttgctcaactgtcagcttcaggaatgcccgccagcgcgacgcctgtgattcgtggcttgatgccgttaggcgttgctcaatttttt

SEQ ID NO: 745 - DNA, 14145 bp, synthetic construct
  misc_feature 1..14145: note = Synthetic
  source 1..14145: mol_type = other DNA
taggtcttgaaaggagtgggaattggctccggtgcccgtcagtgggcagagcgcacatcgcccacagtccccgagaagttggggggaggggtcggcaattgatccggtgcctagagaaggtggcgcggggtaaactgggaaagtgatgtcgtgtactggctccgcctttttcccgagggtgggggagaaccgtatataagtgcagtagtcgccgtgaacgttctttttcgcaacgggtttgccgccagaacacaggggtttagtgaaccgtcagatccgctagcgctaccggactcagatcgccaccatgcccaagaagaaacggaaagtgggctccggggtcaaccccagaggcatgaccatctacctggaacactggaacctgaagcctctggaaatccctcagcggagccggctgtttagcctggaaccagtggctgtgggcacaccttatgccgagagcctgagcagctacctgcacagactggcccaggctcactgtctgaccagccagaaactggtcatgggcgagatcgcccctctgatcctgaaggacgaggacaagagcgagctgctgagcaagaacctgagccatctgctgggcaacagcgacgccaagcctaccatcaacggcatgagagagatgaccggcaagctggtcaccatcctggaagaactgaccatgcggcaggacctgcggtttctgacactgctgtcttggaagggcatgatctacgacaagggcctgttccgcaactacagagcctggtgtccttgctgctgggaagagtggatgcgcgagaacaagacaatctacgagcccctgctgtggtccttcaaggacgtggaattctgcgtgatccacaagcagcggctgatcgaggaatgccctcactgtggcagcagactgcccatcatggccaagtttagccctgccggcttctgcagcagatgctatggatggctgggccaagaagtgaagggcgaagaggaaatcgagaagtaccgcgtgaacatccagggcatctccgagctgattgccctgacacctcagctgggctacgagcctattcctatcgagctgacccggaaactgcagctgatcctgctggtgttcgagcaggccatcggcaaggatctgaacctgctgggcgatctgggcagaatcatggaaagcctgcggatcgccagcaagaccaaccagaaccagccttaccacctggtcaagctgatcatccccgtgtgcgagaaggccaagatcagcgtgtcccagctgttcggcctggactttcaagagctgggcaagatcctgttcggcaatttctccctggaactgaaactgggctccgggtccggggggtccggggccacaaacttttccctgctgaagcaggctggcgacgtggaggaaaaccccggacctatgcctaagaagaaaagaaaagtgggcagcggagtggccacacagcccaagatcagcctgtctctggatgccgccgacaccaccatcatgcacagagttggaatggccggcctgtacatgaccctgaagcggctggaaaagcagtaccccagcagcagacagagaggcggccacatttcttggagcctgaccgccgataccatcgagctgttttggcagggcagcgactttgtggccctgagctggctgatcaaagagagctttcagctggacgacaccggcctgatccacctgacaggcctggacaacgacgccatcaacctgagccagaagatccacatccacgagggaatctgcgccgtgttcctgcggctgaacaagttttaccaggccggcgagatcgtgaacaccgagctgacagtggaagagaagaaggtggaataccagtacaagagcctgacttggtacgcccaccaggcctttgccgagaagctgtgcgaagccgatacacagcagctgcggcacgactacgtgcagatcacaagctggctgtacctcggcggaattgtgcggcatgccagaacacagaacaccaccaagctggaagaaaagcccgagtacgccctggctctgctgtttgtgcctgtcgtgtgccactactgcctgctgcacatccctagcgaggacctgaaagagaaaaagccccacagatacctggtggtcatccccgagatcaaggacttcgaggatgccagccagagaagatggcggctgcagcagctggaaacaaagcagctgcacgtgtccagcctgggagaagccggcctgctgtactacagcctggacgatattcagcccgagggcgactactaccaggcctgccaagtttggctgtacgagaagatgaaccaggccagccggcagagaaccctgatgagcatcgaggaaatcgagatcgacaagaacaccctgatcacctaccagcaggtccagaagtactttcagcccaactatcagaagatcgagtacaagcagatcttcatcaaagtgaaccccattcggtccctgatcgccgacaatctggtcaccggaatccactggtggtccaacttttgggagaaactggtcatcgaggacagcaaagagtacctgttcaaccagatcttccccaaccgcgagggcttcatcagaatggccgagaacagcgaagaggacaagcactacctgatctttatcaaggtgttccagcaggccatgaagggcaacttcgccaagatgtacgccaaggccgaggacggcaaggaccctcctatcaagaaaaaagtggaacggctgcgggccgagctgaactactgttacgatgagctgagcttcaaagagtatctgagcgacttcctcgtcagaggtggcctgaacaaatacctgaaccagaatcaggccgagatcctgctgctgatcaagaagctgccctggcaagagctgagaatctgggccctgctggccattgccagctacaagcccaaagagaagcccatcagcaaggacgacagcctgacactgaacaaccagcagctcgaagagatgaacgacgagagcgaggaagaggggagcggctctggaggctctggagccacaaatttctctctgctgaaacaggctggggatgtggaggaaaatcctggacccatgcccaagaagaagaggaaggtgggatccggcatgagccagaagaagaacgacaacaacatccccaactactacctgtacggcaccgtgctgaccagatacggactggccagcctgaaccacgacatgcggagaggcaacaagaccacactgcagaaaggctactggaacggcaagatccacagcttcgtgggcagcagcgccattagatgggccctgaggttctatctgcagaaacagggctacctggtcaacagagtgtgggacgaagatgagcacatcaaccggctgaccaacgaggacttcgaccccgagcagttctacgacgacgacatcttcggcttcgccctgctggaaagcgccgagatcgaggaagagacaagcaccaccaagcggaagaagaagcagaccaagaccagcacaccccaccagagaatgggagccctggccatgaatatggccgtgtctctgaccccttacgatggcgccgtgaagctgggagccaagtctggcagagagaaggacagcaccagcctgcacttcaccgagtaccacgccaccagataccagtactacttcggcatcaacgccacacacctgaaggacttcagccggatcctgcctgtgatcgacggcatcatgaacctgcctaaagtcggcggcaacagcaatatcttcaactaccctttctgccccgacagcctggtgctgcagtggaccaacaatttcgccagctacatcagctactgcttcgagtactgcgaccctcagagcaaagaggccaagttcacccaagagttcatcgacgaggtggaatgcggccagatcgagccttctcagctctggatcggcggcaccatcgtgaaggatctgcagcagctggacaacttcgacgacagccccttcaagaaggcccacatctaccggaaccggaacgagctgatcgagaacctgaaaaccgtgatcacccggaacctgggcctcgaggaatccaagggctctggaagcggcggaagcggcgctaccaactttagcctgctgaagcaggccggcgacgtggaggaaaacccagggcccatgcccaaaaagaagcggaaagtgggctccggggccgctctgctgatccagagcgaggaatacgtggacctgaccttcaagctgagaggcgcccctattcctctggacaacggctacgtgatctacagcgccctgagcagaatctgccccatcctgcacgagctggacaacatcggcattcaccctatcgccggcattcccaccagaaacaacctgctggaactgacagcccagagccggctgaaagtgcggattcaccaccagcagatccctctgatctacccctatctggccggacagaccttccacatcggccagaatagctaccagctggacatccccgactacaagcccctgatcagcagcgagagcgtgtacagcagactggtcatcatcaccggcttccaagagcctaccaacttcatcgaggccgtgcagcggaagctggataacaagggcatccagggcaagatcgagctgctgaccagacaggatggcacccctcagaagagacagctgaccatcaacaagcagggcaagcagttcaaagtgcgcggctttggcgtgcggatcagcgagctgaatcctgaggatagcctgacactgcaagagcagggcatctccggcaagcggaagatgatgtgcggcatcttcgtgcccgccaccagatccaaagaggaagaggaaaccggaagcgggtccggagggtccggagccactaatttctccctgctgaaacaggcaggcgatgtggaagagaatcccgggcctatgcccaaaaagaaaaggaaggtgggatccggcacagcccctctgatcctgtacctggatgtgcccttcgccaccttcagagagtctcacgccagagagatgggcaagacataccccgttcctccaccagccacagtgtacggcatgctgctgtctctcgtgggcgagacagacgtgtacagacactgcggagtggaactggccattgccatgctgagcatccccaagaagtcccggatcctgcggcagatgcggagattcaagaacgccgacttctctcaccccgagaacgtgatcccttgctaccaagagatcctgagcaacctgaagtgcctgatctgggtccgaagcgagggcgagaagatccagcctagcctgagagagagaatccagctggccctggatcaccctgaactcgtcagaagattcggctgcctgttcctgggcgagagcgaccagctgatcaagagcatcaagctggtgtcccaggactacctgcagggcgtcagacagtgggtcatcagagacaacagaggctggctgaccctgccttactgggttgaccacgtgggcagcagaaatacccggttcctgagataccggatcgaggaaatccctagcagccctcctcctgacctggcctggacaatgattcagagccccatcggatccggaagcgggggaagcggggccactaacttttctctgctgaagcaggcaggggacgtggaagagaaccctggccccatgtacccctacgacgtgccagactacgcccctaagaagaagagaaaagtcggcggctctggcggcggaggatctggcggaggtggaagcggaggaaaggaacagttcgagcagtgggtcgcccggctgcagatttctgaagccggccagaaaatcatcgagaaagtgcggagcagcgagcccagcagaagagttggcggcggaagcaaaaatgtggccggcagataccccagccggaagatgggagtgaccatccagttcgagagccacagagtggaactgcccgtgatctaccagctggaacacgacgaggacgtgctggaattctacgaccagcctcctcagatcaagctggactaccaggccagcaatggcagacgactgggagtgctgcacacccctgatctgttcgtgatcaggaccaatagcgccggctgggaagagtgcaagaccgagcaggatctgaagaagctggcccagaagaaccccaaccggtacttctacagccaagaggacaaccagtggcactgccctccaggcgaagtgtacgccgatcagttcggcctgtactaccggatcagaagcgacaaagaaatcaactgggtgctgcagcggaacctgcagttcctggaagattactaccgcagcgagagcctgggcgtcgaacaggctattgctcagtctctgctggccatcgtgtctagccagcctggaattacactggccgagctgctgcatcagcagacaggcgccaagagcgacgacatctacaccctgatcgtgcaagagcagatctacttcgacctgaacgccgctcctctggctgagcctgagagatgcctgatcttcagggatgagcagaccgccagcgcctacagactgatggtggaacagcccaacgtgtccctgcctgccatctctcccgtgatcaatatcgccaccggcacacccgtgtcctgggatggaaagggcctgaacatcatcctcgtgggcgagacagaagtgatcctgggcgccgagaatgaccagctgatcaagttcaagaaaaacgtgttcgaggaactcgtgcggcagggcgagatcacatctctgcagaccccagagaaaaccgacatcagcaccgagagctggcagcggttttaccaggcctctccagaggatcaggccgaggctctggaacggtacaagaccatcgagccctacctgaacggacaccctcctgagaacgagacaatccccgccagaaccatcagagactggaaggccaagtacctgacagccctgcagaagtacggctgcggctatatcggcctgctgtcccacagaagcgtgaagggcaacagacagagaaagctgcccgaggacaccctggccatcatggaaagattcattctcgaggactacgagacactgaagcagaaacggatgctggaagtgtatggcgccctggtgctggcttgtgaacagagcagtgtgatcgcccctagctacaaggccttcaccaaagaagtgaagcggcggaccggctacgagcagaccaagaagagacaaggcagaagggccgcctaccagtacgagagcttttactgggagctgacccagaaaacaccccggcacggcgatagacctttcgagatcggacacatcgatcacacccagctggacgtggaacttgtgtgctccagaaccggcagaaacctgggcagaccttgggccacctttctggtggatgcctactctagaaggctgctggccgtgtacctgaccttcgacagcccaagctaccggtcctgtctgatggtgctgcggatctgcgtgaagaggcatggcagactgcctcagatcgtggtggtggacaatggcaccgagttccacagcgtgtacttcgaaaccctgctggctaccttcgagtgcaccaagaagcagcggcctccagccaaggccagatttggcagcgtgtgcgagagactgttcggcaccagcaacacccagttcgtgcacaacctgctgggcaatacccagatcacccggaacgtgcggcaagtgaccaagagcgtgaaccccaagaatcaggccgtgtggacactgggactgctgtacgagtatctgtgcgcctgggcctacgaggtgtacgacacagatgaacaccccgctctgtttcagagccccagggatgcttttgccgccggaatggtcacaagcggcagcagactgcaccggatgatcccttacgacgagaacttccagatcctgacactgcccaccaccagcgagggcaaagccaaggtgcaagttggcagaggcgtgaagatcaacagcatctactactggtccaacagcttcagggacccacagatcgagaacaccagcgtgcccaccagatacgaccccttcaacatcggaatcgcctacgccttcgtcagaggccagtgggtgcagtgcatcagccagtactacagccagctgcagggcagatccgagaaagagctgaagctggctagcgccgagctgagaaagagaagcagcaactacggcagacagagccaggtgtccgccaagaacctggccgaatttctggccagcgtcgaggcccaagagacactgctggaacagagaagctacgacgccgaggccagagaagtgttcatcgtgatcgaaggcggcaaggccgccaccagcagaaatgagcagcctaagctgatccaggtgccgtttgagaacaccgacacacaggtggccgaggacgaggccattacacctgaaacactggtggtgtacgaggaattcagcctgtgactagcaacgttactggccgaagccgcttggaataaggccggtgtgcgtttgtctatatgttattttccaccatattgccgtcttttggcaatgtgagggcccggaaacctggccctgtcttcttgacgagcattcctaggggtctttcccctctcgccaaaggaatgcaaggtctgttgaatgtcgtgaaggaagcagttcctctggaagcttcttgaagacaaacaacgtctgtagcgaccctttgcaggcagcggaaccccccacctggcgacaggtgcctctgcggccaaaagccacgtgtataagatacacctgcaaaggcggcacaaccccagtgccacgttgtgagttggatagttgtggaaagagtcaaatggctctcctcaagcgtattcaacaaggggctgaaggatgcccagaaggtaccccattgtatgggatctgatctggggcctcggtgcacatgctttacatgtgtttagtcgaggttaaaaaaacgtctaggccccccgaaccacggggacgtggttttcctttgaaaaacacgatgataatatggccacaaccatgaccgagtacaagcccacggtgcgcctcgccacccgcgacgacgtccccagggccgtacgcaccctcgccgccgcgttcgccgactaccccgccacgcgccacaccgtcgatccggaccgccacatcgagcgggtcaccgagctgcaagaactcttcctcacgcgcgtcgggctcgacatcggcaaggtgtgggtcgcggacgacggcgccgcggtggcggtctggaccacgccggagagcgtcgaagcgggggcggtgttcgccgagatcggcccgcgcatggccgagttgagcggttcccggctggccgcgcagcaacagatggaaggcctcctggcgccgcaccggcccaaggagcccgcgtggttcctggccaccgtcggcgtgtcgcccgaccaccagggcaagggtctgggcagcgccgtcgtgctccccggagtggaggcggccgagcgcgccggggtgcccgccttcctggagacctccgcgccccgcaacctccccttctacgagcggctcggcttcaccgtcaccgccgacgtcgaggtgcccgaaggaccgcgcacctggtgcatgacccgcaagcccggtgccggcagcggcagcggcgcaaccaatttcagcctgctgaaacaggccggcgatgtggaagagaatccaggccccatgtacccctacgacgtgccagactacgcccctaagaagaagagaaaagtcggcggctctggcggcggaggatctggcggaggtggaagcggaggaacccagaccaacggcttccctctggaactgctgaccagacctgctcctgagagactggcctacttcgagaactacaccgtgggacaccccagactgaaagaggtgtccgagatcctgatgcggacaatcgctgaacctgccggcgctagcttcatcttcgtgtatggacctagcggcgtgggcaagaccacactgagactgagagtggaacagaaactgaccgagctggtgctgcccctgctggaatctgatagaggcagagtgcctgtcgtgggcgttgaagctgtggcccctgagagcagaaacttcaactggaaggactactacacacgggccctgatcgccctggaagaacctctgatcgaccacaagttcgactacggcgtgcggggcatcagcagagacaacttcggcaagatcaacgtggaaagcaaggtggtggccccagctctgagaagggccctcgaaaatgccctgatccacagacaccccgacgtgttctttgtggacgaggcccagcactttggcaagatggccagcggctacaagctgcaggatcagctggattgcctgaagtccctggccaacatgaccggcatcctgcactgtctgctgggcacatacgagctgctgaccttcagaaacctgagcggccagctgtctcggagaagcgtggacatccacttcagacggtactgcgccgagaatcccgaagatgtgcaggccttcaagagcgtgctgctgactttccagcagcagatgcctctggccgaggctcctgatctggtgtctcactgggagtacttctacgagagaaccctgggctgcgtgggcatcctgaagaactggctgacaagagccctgaaggacgccctggatagagaagccaccaccgtgacactgaaggacctgcagaaacgcgcttggagcgtggcccagtgccagcggatgttcaaagagatccaagagggcgaaagacagctgagcgagacagagacagacatccagaacctgagatctgccctcggcctgggagccaagcctattgtgctgcctgaggaaacccctaagaccaccagacctccaggcaaagtgggcaaaagaaagcccaagagggaccccatcggagtgcagcaggatgtgtcttgacctcaggtgcaggctgcctatcagaaggtggtggctggtgtggccaatgccctggctcacaaataccactgagatctttttccctctgccaaaaattatggggacatcatgaagccccttgagcatctgacttctggctaataaaggaaatttattttcattgcaatagtgtgttggaattttttgtgtctctcactcggaaggacatatgggagggcaaatcatttaaaacatcagaatgagtatttggtttagagtttggcaacatatgcccatatgctggctgccatgaacaaaggttggctataaagaggtcatcagtatatgaaacagccccctgctgtccattccttattccatagaaaagccttgacttgaggttagattttttttatattttgttttgtgttatttttttctttaacatccctaaaattttccttacatgttttactagccagatttttcctcctctcctgactactcccagtcatagctgtccctcttctcttatggagatccctcgacctgcagcccaagcttggcgtaatcatggtcatagctgtttcctgtgtgaaattgttatccgctcacaattccacacaacatacgagccggaagcataaagtgtaaagcctggggtgcctaatgagtgagctaactcacattaattgcgttgcgctcactgcccgctttccagtcgggaaacctgtcgtgccagcggatccattccacagaattaaaaaattgagcaacgcctaacggcatcaagccacgaatcacaggcgtcgcgctggcgggcattcctgaagctgacagttgagcaacgcctaacggcatcaagccacgaatcacgtcctttccacaagatatataaagccaagaaatcgaaatactttcaagttacggtaagcatatgatagtccattttaaaacataattttaaaactgcaaactacccaagaaattattactttctacgtcacgtattttgtactaatatctttgtgtttacagtcaaattaattctaattatctctctaacagccttgtatcgtatatgcaaatatgaaggaatcatgggaaataggccctccgctgcattaatgaatcggccaacgcgcggggagaggcggtttgcgtattgggcgctgttccgcttcctcgctcactgactcgctgcgctcggtcgttcggctgcggcgagcggtatcagctcactcaaaggcggtaatacggttatccacagaatcaggggataacgcaggaaagaacatgtgagcaaaaggccagcaaaaggccaggaaccgtaaaaaggccgcgttgctggcgtttttccataggctccgcccccctgacgagcatcacaaaaatcgacgctcaagtcagaggtggcgaaacccgacaggactataaagataccaggcgtttccccctggaagctccctcgtgcgctctcctgttccgaccctgccgcttaccggatacctgtccgcctttctcccttcgggaagcgtggcgctttctcatagctcacgctgtaggtatctcagttcggtgtaggtcgttcgctccaagctgggctgtgtgcacgaaccccccgttcagcccgaccgctgcgccttatccggtaactatcgtcttgagtccaacccggtaagacacgacttatcgccactggcagcagccactggtaacaggattagcagagcgaggtatgtaggcggtgctacagagttcttgaagtggtggcctaactacggctacactagaagaacagtatttggtatctgcgctctgctgaagccagttaccttcggaaaaagagttggtagctcttgatccggcaaacaaaccaccgctggtagcggtggtttttttgtttgcaagcagcagattacgcgcagaaaaaaaggatctcaagaagatcctttgatcttttctacggggtctgacgctcagtggaacgaaaactcacgttaagggattttggtcatgagattatcaaaaaggatcttcacctagatccttttaaattaaaaatgaagttttaaatcaatctaaagtatatatgagtaaacttggtctgacagttaccaatgcttaatcagtgaggcacctatctcagcgatctgtctatttcgttcatccatagttgcctgactccccgtcgtgtagataactacgatacgggagggcttaccatctggccccagtgctgcaatgataccgcgagaaccacgctcaccggctccagatttatcagcaataaaccagccagccggaagggccgagcgcagaagtggtcctgcaactttatccgcctccatccagtctattaattgttgccgggaagctagagtaagtagttcgccagttaatagtttgcgcaacgttgttgccattgctacaggcatcgtggtgtcacgctcgtcgtttggtatggcttcattcagctccggttcccaacgatcaaggcgagttacatgatcccccatgttgtgcaaaaaagcggttagctccttcggtcctccgatcgttgtcagaagtaagttggccgcagtgttatcactcatggttatggcagcactgcataattctcttactgtcatgccatccgtaagatgcttttctgtgactggtgagtactcaaccaagtcattctgagaatagtgtatgcggcgaccgagttgctcttgcccggcgtcaatacgggataataccgcgccacatagcagaactttaaaagtgctcatcattggaaaacgttcttcggggcgaaaactctcaaggatcttaccgctgttgagatccagttcgatgtaacccactcgtgcacccaactgatcttcagcatcttttactttcaccagcgtttctgggtgagcaaaaacaggaaggcaaaatgccgcaaaaaagggaataagggcgacacggaaatgttgaatactcatactcttcctttttcaatattattgaagcatttatcagggttattgtctcatgagcggatacatatttgaatgtatttagaaaaataaacaaataggggttccgcgcacatttccccgaaaagtgccacctgggtcgacattgattattgactagtaatagtaatcaattacggggtcattagttcatagcccatatatggagttccg

SEQ ID NO: 746 - DNA, 14517 bp, synthetic construct
  misc_feature 1..14517: note = Synthetic
  source 1..14517: mol_type = other DNA
cgcctggctgaccgcccaacgacccccgcccattgacgtcaataatgacgtatgttcccatagtaacgccaatagggactttccattgacgtcaatgggtggagtatttacggtaaactgcccacttggcagtacatcaagtgtatcatatgccaagtacgccccctattgacgtcaatgacggtaaatggcccgcctggcattatgcccagtacatgaccttatgggactttcctacttggcagtacatctacgtattagtcatcgctattaccatggtgatgcggttttggcagtacatcaatgggcgtggatagcggtttgactcacggggatttccaagtctccaccccattgacgtcaatgggagtttgttttggcaccaaaatcaacgggactttccaaaatgtcgtaacaactccgccccattgacgcaaatgggcggtaggcgtgtacggtgggaggtctatataagcagagctggtttagtgaaccgtcagatccgctagcgctaccggactcagatcgccaccatgcccaagaagaaacggaaagtgggctccggggtggccacacagcccaagatcagcctgtctctggatgccgccgacaccaccatcatgcacagagttggaatggccggcctgtacatgaccctgaagcggctggaaaagcagtaccccagcagcagacagagaggcggccacatttcttggagcctgaccgccgataccatcgagctgttttggcagggcagcgactttgtggccctgagctggctgatcaaagagagctttcagctggacgacaccggcctgatccacctgacaggcctggacaacgacgccatcaacctgagccagaagatccacatccacgagggaatctgcgccgtgttcctgcggctgaacaagttttaccaggccggcgagatcgtgaacaccgagctgacagtggaagagaagaaggtggaataccagtacaagagcctgacttggtacgcccaccaggcctttgccgagaagctgtgcgaagccgatacacagcagctgcggcacgactacgtgcagatcacaagctggctgtacctcggcggaattgtgcggcatgccagaacacagaacaccaccaagctggaagaaaagcccgagtacgccctggctctgctgtttgtgcctgtcgtgtgccactactgcctgctgcacatccctagcgaggacctgaaagagaaaaagccccacagatacctggtggtcatccccgagatcaaggacttcgaggatgccagccagagaagatggcggctgcagcagctggaaacaaagcagctgcacgtgtccagcctgggagaagccggcctgctgtactacagcctggacgatattcagcccgagggcgactactaccaggcctgccaagtttggctgtacgagaagatgaaccaggccagccggcagagaaccctgatgagcatcgaggaaatcgagatcgacaagaacaccctgatcacctaccagcaggtccagaagtactttcagcccaactatcagaagatcgagtacaagcagatcttcatcaaagtgaaccccattcggtccctgatcgccgacaatctggtcaccggaatccactggtggtccaacttttgggagaaactggtcatcgaggacagcaaagagtacctgttcaaccagatcttccccaaccgcgagggcttcatcagaatggccgagaacagcgaagaggacaagcactacctgatctttatcaaggtgttccagcaggccatgaagggcaacttcgccaagatgtacgccaaggccgaggacggcaaggaccctcctatcaagaaaaaagtggaacggctgcgggccgagctgaactactgttacgatgagctgagcttcaaagagtatctgagcgacttcctcgtcagaggtggcctgaacaaatacctgaaccagaatcaggccgagatcctgctgctgatcaagaagctgccctggcaagagctgagaatctgggccctgctggccattgccagctacaagcccaaagagaagcccatcagcaaggacgacagcctgacactgaacaaccagcagctcgaagagatgaacgacgagagcgaggaagagggctccgggtccggggggtccggggccacaaacttttccctgctgaagcaggctggcgacgtggaggaaaaccccggacctatgcctaagaagaaaagaaaagtgggcagcggagtcaaccccagaggcatgaccatctacctggaacactggaacctgaagcctctggaaatccctcagcggagccggctgtttagcctggaaccagtggctgtgggcacaccttatgccgagagcctgagcagctacctgcacagactggcccaggctcactgtctgaccagccagaaactggtcatgggcgagatcgcccctctgatcctgaaggacgaggacaagagcgagctgctgagcaagaacctgagccatctgctgggcaacagcgacgccaagcctaccatcaacggcatgagagagatgaccggcaagctggtcaccatcctggaagaactgaccatgcggcaggacctgcggtttctgacactgctgtcttggaagggcatgatctacgacaagggcctgttccgcaactacagagcctggtgtccttgctgctgggaagagtggatgcgcgagaacaagacaatctacgagcccctgctgtggtccttcaaggacgtggaattctgcgtgatccacaagcagcggctgatcgaggaatgccctcactgtggcagcagactgcccatcatggccaagtttagccctgccggcttctgcagcagatgctatggatggctgggccaagaagtgaagggcgaagaggaaatcgagaagtaccgcgtgaacatccagggcatctccgagctgattgccctgacacctcagctgggctacgagcctattcctatcgagctgacccggaaactgcagctgatcctgctggtgttcgagcaggccatcggcaaggatctgaacctgctgggcgatctgggcagaatcatggaaagcctgcggatcgccagcaagaccaaccagaaccagccttaccacctggtcaagctgatcatccccgtgtgcgagaaggccaagatcagcgtgtcccagctgttcggcctggactttcaagagctgggcaagatcctgttcggcaatttctccctggaactgaaactggggagcggctctggaggctctggagccacaaatttctctctgctgaaacaggctggggatgtggaggaaaatcctggacccatgcccaagaagaagaggaaggtgggatccggcacagcccctctgatcctgtacctggatgtgcccttcgccaccttcagagagtctcacgccagagagatgggcaagacataccccgttcctccaccagccacagtgtacggcatgctgctgtctctcgtgggcgagacagacgtgtacagacactgcggagtggaactggccattgccatgctgagcatccccaagaagtcccggatcctgcggcagatgcggagattcaagaacgccgacttctctcaccccgagaacgtgatcccttgctaccaagagatcctgagcaacctgaagtgcctgatctgggtccgaagcgagggcgagaagatccagcctagcctgagagagagaatccagctggccctggatcaccctgaactcgtcagaagattcggctgcctgttcctgggcgagagcgaccagctgatcaagagcatcaagctggtgtcccaggactacctgcagggcgtcagacagtgggtcatcagagacaacagaggctggctgaccctgccttactgggttgaccacgtgggcagcagaaatacccggttcctgagataccggatcgaggaaatccctagcagccctcctcctgacctggcctggacaatgattcagagccccatcggctctggaagcggcggaagcggcgctaccaactttagcctgctgaagcaggccggcgacgtggaggaaaacccagggcccatgcccaaaaagaagcggaaagtgggctccggggccgctctgctgatccagagcgaggaatacgtggacctgaccttcaagctgagaggcgcccctattcctctggacaacggctacgtgatctacagcgccctgagcagaatctgccccatcctgcacgagctggacaacatcggcattcaccctatcgccggcattcccaccagaaacaacctgctggaactgacagcccagagccggctgaaagtgcggattcaccaccagcagatccctctgatctacccctatctggccggacagaccttccacatcggccagaatagctaccagctggacatccccgactacaagcccctgatcagcagcgagagcgtgtacagcagactggtcatcatcaccggcttccaagagcctaccaacttcatcgaggccgtgcagcggaagctggataacaagggcatccagggcaagatcgagctgctgaccagacaggatggcacccctcagaagagacagctgaccatcaacaagcagggcaagcagttcaaagtgcgcggctttggcgtgcggatcagcgagctgaatcctgaggatagcctgacactgcaagagcagggcatctccggcaagcggaagatgatgtgcggcatcttcgtgcccgccaccagatccaaagaggaagaggaaaccggaagcgggtccggagggtccggagccactaatttctccctgctgaaacaggcaggcgatgtggaagagaatcccgggcctatgcccaaaaagaaaaggaaggtgggatccggcatgagccagaagaagaacgacaacaacatccccaactactacctgtacggcaccgtgctgaccagatacggactggccagcctgaaccacgacatgcggagaggcaacaagaccacactgcagaaaggctactggaacggcaagatccacagcttcgtgggcagcagcgccattagatgggccctgaggttctatctgcagaaacagggctacctggtcaacagagtgtgggacgaagatgagcacatcaaccggctgaccaacgaggacttcgaccccgagcagttctacgacgacgacatcttcggcttcgccctgctggaaagcgccgagatcgaggaagagacaagcaccaccaagcggaagaagaagcagaccaagaccagcacaccccaccagagaatgggagccctggccatgaatatggccgtgtctctgaccccttacgatggcgccgtgaagctgggagccaagtctggcagagagaaggacagcaccagcctgcacttcaccgagtaccacgccaccagataccagtactacttcggcatcaacgccacacacctgaaggacttcagccggatcctgcctgtgatcgacggcatcatgaacctgcctaaagtcggcggcaacagcaatatcttcaactaccctttctgccccgacagcctggtgctgcagtggaccaacaatttcgccagctacatcagctactgcttcgagtactgcgaccctcagagcaaagaggccaagttcacccaagagttcatcgacgaggtggaatgcggccagatcgagccttctcagctctggatcggcggcaccatcgtgaaggatctgcagcagctggacaacttcgacgacagccccttcaagaaggcccacatctaccggaaccggaacgagctgatcgagaacctgaaaaccgtgatcacccggaacctgggcctcgaggaatccaagggatccggaagcgggggaagcggggccactaacttttctctgctgaagcaggcaggggacgtggaagagaaccctggccccatgtacccctacgacgtgccagactacgcccctaagaagaagagaaaagtcggcggctctggcggcggaggatctggcggaggtggaagcggaggaaaggaacagttcgagcagtgggtcgcccggctgcagatttctgaagccggccagaaaatcatcgagaaagtgcggagcagcgagcccagcagaagagttggcggcggaagcaaaaatgtggccggcagataccccagccggaagatgggagtgaccatccagttcgagagccacagagtggaactgcccgtgatctaccagctggaacacgacgaggacgtgctggaattctacgaccagcctcctcagatcaagctggactaccaggccagcaatggcagacgactgggagtgctgcacacccctgatctgttcgtgatcaggaccaatagcgccggctgggaagagtgcaagaccgagcaggatctgaagaagctggcccagaagaaccccaaccggtacttctacagccaagaggacaaccagtggcactgccctccaggcgaagtgtacgccgatcagttcggcctgtactaccggatcagaagcgacaaagaaatcaactgggtgctgcagcggaacctgcagttcctggaagattactaccgcagcgagagcctgggcgtcgaacaggctattgctcagtctctgctggccatcgtgtctagccagcctggaattacactggccgagctgctgcatcagcagacaggcgccaagagcgacgacatctacaccctgatcgtgcaagagcagatctacttcgacctgaacgccgctcctctggctgagcctgagagatgcctgatcttcagggatgagcagaccgccagcgcctacagactgatggtggaacagcccaacgtgtccctgcctgccatctctcccgtgatcaatatcgccaccggcacacccgtgtcctgggatggaaagggcctgaacatcatcctcgtgggcgagacagaagtgatcctgggcgccgagaatgaccagctgatcaagttcaagaaaaacgtgttcgaggaactcgtgcggcagggcgagatcacatctctgcagaccccagagaaaaccgacatcagcaccgagagctggcagcggttttaccaggcctctccagaggatcaggccgaggctctggaacggtacaagaccatcgagccctacctgaacggacaccctcctgagaacgagacaatccccgccagaaccatcagagactggaaggccaagtacctgacagccctgcagaagtacggctgcggctatatcggcctgctgtcccacagaagcgtgaagggcaacagacagagaaagctgcccgaggacaccctggccatcatggaaagattcattctcgaggactacgagacactgaagcagaaacggatgctggaagtgtatggcgccctggtgctggcttgtgaacagagcagtgtgatcgcccctagctacaaggccttcaccaaagaagtgaagcggcggaccggctacgagcagaccaagaagagacaaggcagaagggccgcctaccagtacgagagcttttactgggagctgacccagaaaacaccccggcacggcgatagacctttcgagatcggacacatcgatcacacccagctggacgtggaacttgtgtgctccagaaccggcagaaacctgggcagaccttgggccacctttctggtggatgcctactctagaaggctgctggccgtgtacctgaccttcgacagcccaagctaccggtcctgtctgatggtgctgcggatctgcgtgaagaggcatggcagactgcctcagatcgtggtggtggacaatggcaccgagttccacagcgtgtacttcgaaaccctgctggctaccttcgagtgcaccaagaagcagcggcctccagccaaggccagatttggcagcgtgtgcgagagactgttcggcaccagcaacacccagttcgtgcacaacctgctgggcaatacccagatcacccggaacgtgcggcaagtgaccaagagcgtgaaccccaagaatcaggccgtgtggacactgggactgctgtacgagtatctgtgcgcctgggcctacgaggtgtacgacacagatgaacaccccgctctgtttcagagccccagggatgcttttgccgccggaatggtcacaagcggcagcagactgcaccggatgatcccttacgacgagaacttccagatcctgacactgcccaccaccagcgagggcaaagccaaggtgcaagttggcagaggcgtgaagatcaacagcatctactactggtccaacagcttcagggacccacagatcgagaacaccagcgtgcccaccagatacgaccccttcaacatcggaatcgcctacgccttcgtcagaggccagtgggtgcagtgcatcagccagtactacagccagctgcagggcagatccgagaaagagctgaagctggctagcgccgagctgagaaagagaagcagcaactacggcagacagagccaggtgtccgccaagaacctggccgaatttctggccagcgtcgaggcccaagagacactgctggaacagagaagctacgacgccgaggccagagaagtgttcatcgtgatcgaaggcggcaaggccgccaccagcagaaatgagcagcctaagctgatccaggtgccgtttgagaacaccgacacacaggtggccgaggacgaggccattacacctgaaacactggtggtgtacgaggaattcagcctgtgactagcaacgttactggccgaagccgcttggaataaggccggtgtgcgtttgtctatatgttattttccaccatattgccgtcttttggcaatgtgagggcccggaaacctggccctgtcttcttgacgagcattcctaggggtctttcccctctcgccaaaggaatgcaaggtctgttgaatgtcgtgaaggaagcagttcctctggaagcttcttgaagacaaacaacgtctgtagcgaccctttgcaggcagcggaaccccccacctggcgacaggtgcctctgcggccaaaagccacgtgtataagatacacctgcaaaggcggcacaaccccagtgccacgttgtgagttggatagttgtggaaagagtcaaatggctctcctcaagcgtattcaacaaggggctgaaggatgcccagaaggtaccccattgtatgggatctgatctggggcctcggtgcacatgctttacatgtgtttagtcgaggttaaaaaaacgtctaggccccccgaaccacggggacgtggttttcctttgaaaaacacgatgataatatggccacaaccatggtgagcaagggcgaggagctgttcaccggggtggtgcccatcctggtcgagctggacggcgacgtaaacggccacaagttcagcgtgtccggcgagggcgagggcgatgccacctacggcaagctgaccctgaagttcatctgcaccaccggcaagctgcccgtgccctggcccaccctcgtgaccaccctgacctacggcgtgcagtgcttcagccgctaccccgaccacatgaagcagcacgacttcttcaagtccgccatgcccgaaggctacgtccaggagcgcaccatcttcttcaaggacgacggcaactacaagacccgcgccgaggtgaagttcgagggcgacaccctggtgaaccgcatcgagctgaagggcatcgacttcaaggaggacggcaacatcctggggcacaagctggagtacaactacaacagccacaacgtctatatcatggccgacaagcagaagaacggcatcaaggtgaacttcaagatccgccacaacatcgaggacggcagcgtgcagctcgccgaccactaccagcagaacacccccatcggcgacggccccgtgctgctgcccgacaaccactacctgagcacccagtccgccctgagcaaagaccccaacgagaagcgcgatcacatggtcctgctggagttcgtgaccgccgccgggatcactctcggcatggacgagctgtacaagggcagcggcagcggcgcaaccaatttcagcctgctgaaacaggccggcgatgtggaagagaatccaggccccatgtacccctacgacgtgccagactacgcccctaagaagaagagaaaagtcggcggctctggcggcggaggatctggcggaggtggaagcggaggaacccagaccaacggcttccctctggaactgctgaccagacctgctcctgagagactggcctacttcgagaactacaccgtgggacaccccagactgaaagaggtgtccgagatcctgatgcggacaatcgctgaacctgccggcgctagcttcatcttcgtgtatggacctagcggcgtgggcaagaccacactgagactgagagtggaacagaaactgaccgagctggtgctgcccctgctggaatctgatagaggcagagtgcctgtcgtgggcgttgaagctgtggcccctgagagcagaaacttcaactggaaggactactacacacgggccctgatcgccctggaagaacctctgatcgaccacaagttcgactacggcgtgcggggcatcagcagagacaacttcggcaagatcaacgtggaaagcaaggtggtggccccagctctgagaagggccctcgaaaatgccctgatccacagacaccccgacgtgttctttgtggacgaggcccagcactttggcaagatggccagcggctacaagctgcaggatcagctggattgcctgaagtccctggccaacatgaccggcatcctgcactgtctgctgggcacatacgagctgctgaccttcagaaacctgagcggccagctgtctcggagaagcgtggacatccacttcagacggtactgcgccgagaatcccgaagatgtgcaggccttcaagagcgtgctgctgactttccagcagcagatgcctctggccgaggctcctgatctggtgtctcactgggagtacttctacgagagaaccctgggctgcgtgggcatcctgaagaactggctgacaagagccctgaaggacgccctggatagagaagccaccaccgtgacactgaaggacctgcagaaacgcgcttggagcgtggcccagtgccagcggatgttcaaagagatccaagagggcgaaagacagctgagcgagacagagacagacatccagaacctgagatctgccctcggcctgggagccaagcctattgtgctgcctgaggaaacccctaagaccaccagacctccaggcaaagtgggcaaaagaaagcccaagagggaccccatcggagtgcagcaggatgtgtcttgacctcaggtgcaggctgcctatcagaaggtggtggctggtgtggccaatgccctggctcacaaataccactgagatctttttccctctgccaaaaattatggggacatcatgaagccccttgagcatctgacttctggctaataaaggaaatttattttcattgcaatagtgtgttggaattttttgtgtctctcactcggaaggacatatgggagggcaaatcatttaaaacatcagaatgagtatttggtttagagtttggcaacatatgcccatatgctggctgccatgaacaaaggttggctataaagaggtcatcagtatatgaaacagccccctgctgtccattccttattccatagaaaagccttgacttgaggttagattttttttatattttgttttgtgttatttttttctttaacatccctaaaattttccttacatgttttactagccagatttttcctcctctcctgactactcccagtcatagctgtccctcttctcttatggagatccctcgacctgcagcccaagcttggcgtaatcatggtcatagctgtttcctgtgtgaaattgttatccgctcacaattccacacaacatacgagccggaagcataaagtgtaaagcctggggtgcctaatgagtgagctaactcacattaattgcgttgcgctcactgcccgctttccagtcgggaaacctgtcgtgccagcggatccattccacagaattaaaaaattgagcaacgcctaacggcatcaagccacgaatcacaggcgtcgcgctggcgggcattcctgaagctgacagttgagcaacgcctaacggcatcaagccacgaatcacgtcctttccacaagatatataaagccaagaaatcgaaatactttcaagttacggtaagcatatgatagtccattttaaaacataattttaaaactgcaaactacccaagaaattattactttctacgtcacgtattttgtactaatatctttgtgtttacagtcaaattaattctaattatctctctaacagccttgtatcgtatatgcaaatatgaaggaatcatgggaaataggccctccgctgcattaatgaatcggccaacgcgcggggagaggcggtttgcgtattgggcgctgttccgcttcctcgctcactgactcgctgcgctcggtcgttcggctgcggcgagcggtatcagctcactcaaaggcggtaatacggttatccacagaatcaggggataacgcaggaaagaacatgtgagcaaaaggccagcaaaaggccaggaaccgtaaaaaggccgcgttgctggcgtttttccataggctccgcccccctgacgagcatcacaaaaatcgacgctcaagtcagaggtggcgaaacccgacaggactataaagataccaggcgtttccccctggaagctccctcgtgcgctctcctgttccgaccctgccgcttaccggatacctgtccgcctttctcccttcgggaagcgtggcgctttctcatagctcacgctgtaggtatctcagttcggtgtaggtcgttcgctccaagctgggctgtgtgcacgaaccccccgttcagcccgaccgctgcgccttatccggtaactatcgtcttgagtccaacccggtaagacacgacttatcgccactggcagcagccactggtaacaggattagcagagcgaggtatgtaggcggtgctacagagttcttgaagtggtggcctaactacggctacactagaagaacagtatttggtatctgcgctctgctgaagccagttaccttcggaaaaagagttggtagctcttgatccggcaaacaaaccaccgctggtagcggtggtttttttgtttgcaagcagcagattacgcgcagaaaaaaaggatctcaagaagatcctttgatcttttctacggggtctgacgctcagtggaacgaaaactcacgttaagggattttggtcatgagattatcaaaaaggatcttcacctagatccttttaaattaaaaatgaagttttaaatcaatctaaagtatatatgagtaaacttggtctgacagttaccaatgcttaatcagtgaggcacctatctcagcgatctgtctatttcgttcatccatagttgcctgactccccgtcgtgtagataactacgatacgggagggcttaccatctggccccagtgctgcaatgataccgcgagaaccacgctcaccggctccagatttatcagcaataaaccagccagccggaagggccgagcgcagaagtggtcctgcaactttatccgcctccatccagtctattaattgttgccgggaagctagagtaagtagttcgccagttaatagtttgcgcaacgttgttgccattgctacaggcatcgtggtgtcacgctcgtcgtttggtatggcttcattcagctccggttcccaacgatcaaggcgagttacatgatcccccatgttgtgcaaaaaagcggttagctccttcggtcctccgatcgttgtcagaagtaagttggccgcagtgttatcactcatggttatggcagcactgcataattctcttactgtcatgccatccgtaagatgcttttctgtgactggtgagtactcaaccaagtcattctgagaatagtgtatgcggcgaccgagttgctcttgcccggcgtcaatacgggataataccgcgccacatagcagaactttaaaagtgctcatcattggaaaacgttcttcggggcgaaaactctcaaggatcttaccgctgttgagatccagttcgatgtaacccactcgtgcacccaactgatcttcagcatcttttactttcaccagcgtttctgggtgagcaaaaacaggaaggcaaaatgccgcaaaaaagggaataagggcgacacggaaatgttgaatactcatactcttcctttttcaatattattgaagcatttatcagggttattgtctcatgagcggatacatatttgaatgtatttagaaaaataaacaaataggggttccgcgcacatttccccgaaaagtgccacctgggtcgacattgattattgactagtaatagtaatcaattacggggtcattagttcatagcccatatatggagttccgcgttacataacttacggtaaatggcc

SEQ ID NO: 747 - DNA, 14517 bp, synthetic construct
  misc_feature 1..14517: note = Synthetic
  source 1..14517: mol_type = other DNA
cgcctggctgaccgcccaacgacccccgcccattgacgtcaataatgacgtatgttcccatagtaacgccaatagggactttccattgacgtcaatgggtggagtatttacggtaaactgcccacttggcagtacatcaagtgtatcatatgccaagtacgccccctattgacgtcaatgacggtaaatggcccgcctggcattatgcccagtacatgaccttatgggactttcctacttggcagtacatctacgtattagtcatcgctattaccatggtgatgcggttttggcagtacatcaatgggcgtggatagcggtttgactcacggggatttccaagtctccaccccattgacgtcaatgggagtttgttttggcaccaaaatcaacgggactttccaaaatgtcgtaacaactccgccccattgacgcaaatgggcggtaggcgtgtacggtgggaggtctatataagcagagctggtttagtgaaccgtcagatccgctagcgctaccggactcagatcgccaccatgcccaagaagaaacggaaagtgggctccggggtggccacacagcccaagatcagcctgtctctggatgccgccgacaccaccatcatgcacagagttggaatggccggcctgtacatgaccctgaagcggctggaaaagcagtaccccagcagcagacagagaggcggccacatttcttggagcctgaccgccgataccatcgagctgttttggcagggcagcgactttgtggccctgagctggctgatcaaagagagctttcagctggacgacaccggcctgatccacctgacaggcctggacaacgacgccatcaacctgagccagaagatccacatccacgagggaatctgcgccgtgttcctgcggctgaacaagttttaccaggccggcgagatcgtgaacaccgagctgacagtggaagagaagaaggtggaataccagtacaagagcctgacttggtacgcccaccaggcctttgccgagaagctgtgcgaagccgatacacagcagctgcggcacgactacgtgcagatcacaagctggctgtacctcggcggaattgtgcggcatgccagaacacagaacaccaccaagctggaagaaaagcccgagtacgccctggctctgctgtttgtgcctgtcgtgtgccactactgcctgctgcacatccctagcgaggacctgaaagagaaaaagccccacagatacctggtggtcatccccgagatcaaggacttcgaggatgccagccagagaagatggcggctgcagcagctggaaacaaagcagctgcacgtgtccagcctgggagaagccggcctgctgtactacagcctggacgatattcagcccgagggcgactactaccaggcctgccaagtttggctgtacgagaagatgaaccaggccagccggcagagaaccctgatgagcatcgaggaaatcgagatcgacaagaacaccctgatcacctaccagcaggtccagaagtactttcagcccaactatcagaagatcgagtacaagcagatcttcatcaaagtgaaccccattcggtccctgatcgccgacaatctggtcaccggaatccactggtggtccaacttttgggagaaactggtcatcgaggacagcaaagagtacctgttcaaccagatcttccccaaccgcgagggcttcatcagaatggccgagaacagcgaagaggacaagcactacctgatctttatcaaggtgttccagcaggccatgaagggcaacttcgccaagatgtacgccaaggccgaggacggcaaggaccctcctatcaagaaaaaagtggaacggctgcgggccgagctgaactactgttacgatgagctgagcttcaaagagtatctgagcgacttcctcgtcagaggtggcctgaacaaatacctgaaccagaatcaggccgagatcctgctgctgatcaagaagctgccctggcaagagctgagaatctgggccctgctggccattgccagctacaagcccaaagagaagcccatcagcaaggacgacagcctgacactgaacaaccagcagctcgaagagatgaacgacgagagcgaggaagagggctccgggtccggggggtccggggccacaaacttttccctgctgaagcaggctggcgacgtggaggaaaaccccggacctatgcctaagaagaaaagaaaagtgggcagcggagtcaaccccagaggcatgaccatctacctggaacactggaacctgaagcctctggaaatccctcagcggagccggctgtttagcctggaaccagtggctgtgggcacaccttatgccgagagcctgagcagctacctgcacagactggcccaggctcactgtctgaccagccagaaactggtcatgggcgagatcgcccctctgatcctgaaggacgaggacaagagcgagctgctgagcaagaacctgagccatctgctgggcaacagcgacgccaagcctaccatcaacggcatgagagagatgaccggcaagctggtcaccatcctggaagaactgaccatgcggcaggacctgcggtttctgacactgctgtcttggaagggcatgatctacgacaagggcctgttccgcaactacagagcctggtgtccttgctgctgggaagagtggatgcgcgagaacaagacaatctacgagcccctgctgtggtccttcaaggacgtggaattctgcgtgatccacaagcagcggctgatcgaggaatgccctcactgtggcagcagactgcccatcatggccaagtttagccctgccggcttctgcagcagatgctatggatggctgggccaagaagtgaagggcgaagaggaaatcgagaagtaccgcgtgaacatccagggcatctccgagctgattgccctgacacctcagctgggctacgagcctattcctatcgagctgacccggaaactgcagctgatcctgctggtgttcgagcaggccatcggcaaggatctgaacctgctgggcgatctgggcagaatcatggaaagcctgcggatcgccagcaagaccaaccagaaccagccttaccacctggtcaagctgatcatccccgtgtgcgagaaggccaagatcagcgtgtcccagctgttcggcctggactttcaagagctgggcaagatcctgttcggcaatttctccctggaactgaaactggggagcggctctggaggctctggagccacaaatttctctctgctgaaacaggctggggatgtggaggaaaatcctggacccatgcccaagaagaagaggaaggtgggatccggcacagcccctctgatcctgtacctggatgtgcccttcgccaccttcagagagtctcacgccagagagatgggcaagacataccccgttcctccaccagccacagtgtacggcatgctgctgtctctcgtgggcgagacagacgtgtacagacactgcggagtggaactggccattgccatgctgagcatccccaagaagtcccggatcctgcggcagatgcggagattcaagaacgccgacttctctcaccccgagaacgtgatcccttgctaccaagagatcctgagcaacctgaagtgcctgatctgggtccgaagcgagggcgagaagatccagcctagcctgagagagagaatccagctggccctggatcaccctgaactcgtcagaagattcggctgcctgttcctgggcgagagcgaccagctgatcaagagcatcaagctggtgtcccaggactacctgcagggcgtcagacagtgggtcatcagagacaacagaggctggctgaccctgccttactgggttgaccacgtgggcagcagaaatacccggttcctgagataccggatcgaggaaatccctagcagccctcctcctgacctggcctggacaatgattcagagccccatcggctctggaagcggcggaagcggcgctaccaactttagcctgctgaagcaggccggcgacgtggaggaaaacccagggcccatgcccaaaaagaagcggaaagtgggctccgggatgagccagaagaagaacgacaacaacatccccaactactacctgtacggcaccgtgctgaccagatacggactggccagcctgaaccacgacatgcggagaggcaacaagaccacactgcagaaaggctactggaacggcaagatccacagcttcgtgggcagcagcgccattagatgggccctgaggttctatctgcagaaacagggctacctggtcaacagagtgtgggacgaagatgagcacatcaaccggctgaccaacgaggacttcgaccccgagcagttctacgacgacgacatcttcggcttcgccctgctggaaagcgccgagatcgaggaagagacaagcaccaccaagcggaagaagaagcagaccaagaccagcacaccccaccagagaatgggagccctggccatgaatatggccgtgtctctgaccccttacgatggcgccgtgaagctgggagccaagtctggcagagagaaggacagcaccagcctgcacttcaccgagtaccacgccaccagataccagtactacttcggcatcaacgccacacacctgaaggacttcagccggatcctgcctgtgatcgacggcatcatgaacctgcctaaagtcggcggcaacagcaatatcttcaactaccctttctgccccgacagcctggtgctgcagtggaccaacaatttcgccagctacatcagctactgcttcgagtactgcgaccctcagagcaaagaggccaagttcacccaagagttcatcgacgaggtggaatgcggccagatcgagccttctcagctctggatcggcggcaccatcgtgaaggatctgcagcagctggacaacttcgacgacagccccttcaagaaggcccacatctaccggaaccggaacgagctgatcgagaacctgaaaaccgtgatcacccggaacctgggcctcgaggaatccaagggaagcgggtccggagggtccggagccactaatttctccctgctgaaacaggcaggcgatgtggaagagaatcccgggcctatgcccaaaaagaaaaggaaggtgggatccggcgccgctctgctgatccagagcgaggaatacgtggacctgaccttcaagctgagaggcgcccctattcctctggacaacggctacgtgatctacagcgccctgagcagaatctgccccatcctgcacgagctggacaacatcggcattcaccctatcgccggcattcccaccagaaacaacctgctggaactgacagcccagagccggctgaaagtgcggattcaccaccagcagatccctctgatctacccctatctggccggacagaccttccacatcggccagaatagctaccagctggacatccccgactacaagcccctgatcagcagcgagagcgtgtacagcagactggtcatcatcaccggcttccaagagcctaccaacttcatcgaggccgtgcagcggaagctggataacaagggcatccagggcaagatcgagctgctgaccagacaggatggcacccctcagaagagacagctgaccatcaacaagcagggcaagcagttcaaagtgcgcggctttggcgtgcggatcagcgagctgaatcctgaggatagcctgacactgcaagagcagggcatctccggcaagcggaagatgatgtgcggcatcttcgtgcccgccaccagatccaaagaggaagaggaaaccggatccggaagcgggggaagcggggccactaacttttctctgctgaagcaggcaggggacgtggaagagaaccctggccccatgtacccctacgacgtgccagactacgcccctaagaagaagagaaaagtcggcggctctggcggcggaggatctggcggaggtggaagcggaggaaaggaacagttcgagcagtgggtcgcccggctgcagatttctgaagccggccagaaaatcatcgagaaagtgcggagcagcgagcccagcagaagagttggcggcggaagcaaaaatgtggccggcagataccccagccggaagatgggagtgaccatccagttcgagagccacagagtggaactgcccgtgatctaccagctggaacacgacgaggacgtgctggaattctacgaccagcctcctcagatcaagctggactaccaggccagcaatggcagacgactgggagtgctgcacacccctgatctgttcgtgatcaggaccaatagcgccggctgggaagagtgcaagaccgagcaggatctgaagaagctggcccagaagaaccccaaccggtacttctacagccaagaggacaaccagtggcactgccctccaggcgaagtgtacgccgatcagttcggcctgtactaccggatcagaagcgacaaagaaatcaactgggtgctgcagcggaacctgcagttcctggaagattactaccgcagcgagagcctgggcgtcgaacaggctattgctcagtctctgctggccatcgtgtctagccagcctggaattacactggccgagctgctgcatcagcagacaggcgccaagagcgacgacatctacaccctgatcgtgcaagagcagatctacttcgacctgaacgccgctcctctggctgagcctgagagatgcctgatcttcagggatgagcagaccgccagcgcctacagactgatggtggaacagcccaacgtgtccctgcctgccatctctcccgtgatcaatatcgccaccggcacacccgtgtcctgggatggaaagggcctgaacatcatcctcgtgggcgagacagaagtgatcctgggcgccgagaatgaccagctgatcaagttcaagaaaaacgtgttcgaggaactcgtgcggcagggcgagatcacatctctgcagaccccagagaaaaccgacatcagcaccgagagctggcagcggttttaccaggcctctccagaggatcaggccgaggctctggaacggtacaagaccatcgagccctacctgaacggacaccctcctgagaacgagacaatccccgccagaaccatcagagactggaaggccaagtacctgacagccctgcagaagtacggctgcggctatatcggcctgctgtcccacagaagcgtgaagggcaacagacagagaaagctgcccgaggacaccctggccatcatggaaagattcattctcgaggactacgagacactgaagcagaaacggatgctggaagtgtatggcgccctggtgctggcttgtgaacagagcagtgtgatcgcccctagctacaaggccttcaccaaagaagtgaagcggcggaccggctacgagcagaccaagaagagacaaggcagaagggccgcctaccagtacgagagcttttactgggagctgacccagaaaacaccccggcacggcgatagacctttcgagatcggacacatcgatcacacccagctggacgtggaacttgtgtgctccagaaccggcagaaacctgggcagaccttgggccacctttctggtggatgcctactctagaaggctgctggccgtgtacctgaccttcgacagcccaagctaccggtcctgtctgatggtgctgcggatctgcgtgaagaggcatggcagactgcctcagatcgtggtggtggacaatggcaccgagttccacagcgtgtacttcgaaaccctgctggctaccttcgagtgcaccaagaagcagcggcctccagccaaggccagatttggcagcgtgtgcgagagactgttcggcaccagcaacacccagttcgtgcacaacctgctgggcaatacccagatcacccggaacgtgcggcaagtgaccaagagcgtgaaccccaagaatcaggccgtgtggacactgggactgctgtacgagtatctgtgcgcctgggcctacgaggtgtacgacacagatgaacaccccgctctgtttcagagccccagggatgcttttgccgccggaatggtcacaagcggcagcagactgcaccggatgatcccttacgacgagaacttccagatcctgacactgcccaccaccagcgagggcaaagccaaggtgcaagttggcagaggcgtgaagatcaacagcatctactactggtccaacagcttcagggacccacagatcgagaacaccagcgtgcccaccagatacgaccccttcaacatcggaatcgcctacgccttcgtcagaggccagtgggtgcagtgcatcagccagtactacagccagctgcagggcagatccgagaaagagctgaagctggctagcgccgagctgagaaagagaagcagcaactacggcagacagagccaggtgtccgccaagaacctggccgaatttctggccagcgtcgaggcccaagagacactgctggaacagagaagctacgacgccgaggccagagaagtgttcatcgtgatcgaaggcggcaaggccgccaccagcagaaatgagcagcctaagctgatccaggtgccgtttgagaacaccgacacacaggtggccgaggacgaggccattacacctgaaacactggtggtgtacgaggaattcagcctgtgactagcaacgttactggccgaagccgcttggaataaggccggtgtgcgtttgtctatatgttattttccaccatattgccgtcttttggcaatgtgagggcccggaaacctggccctgtcttcttgacgagcattcctaggggtctttcccctctcgccaaaggaatgcaaggtctgttgaatgtcgtgaaggaagcagttcctctggaagcttcttgaagacaaacaacgtctgtagcgaccctttgcaggcagcggaaccccccacctggcgacaggtgcctctgcggccaaaagccacgtgtataagatacacctgcaaaggcggcacaaccccagtgccacgttgtgagttggatagttgtggaaagagtcaaatggctctcctcaagcgtattcaacaaggggctgaaggatgcccagaaggtaccccattgtatgggatctgatctggggcctcggtgcacatgctttacatgtgtttagtcgaggttaaaaaaacgtctaggccccccgaaccacggggacgtggttttcctttgaaaaacacgatgataatatggccacaaccatggtgagcaagggcgaggagctgttcaccggggtggtgcccatcctggtcgagctggacggcgacgtaaacggccacaagttcagcgtgtccggcgagggcgagggcgatgccacctacggcaagctgaccctgaagttcatctgcaccaccggcaagctgcccgtgccctggcccaccctcgtgaccaccctgacctacggcgtgcagtgcttcagccgctaccccgaccacatgaagcagcacgacttcttcaagtccgccatgcccgaaggctacgtccaggagcgcaccatcttcttcaaggacgacggcaactacaagacccgcgccgaggtgaagttcgagggcgacaccctggtgaaccgcatcgagctgaagggcatcgacttcaaggaggacggcaacatcctggggcacaagctggagtacaactacaacagccacaacgtctatatcatggccgacaagcagaagaacggcatcaaggtgaacttcaagatccgccacaacatcgaggacggcagcgtgcagctcgccgaccactaccagcagaacacccccatcggcgacggccccgtgctgctgcccgacaaccactacctgagcacccagtccgccctgagcaaagaccccaacgagaagcgcgatcacatggtcctgctggagttcgtgaccgccgccgggatcactctcggcatggacgagctgtacaagggcagcggcagcggcgcaaccaatttcagcctgctgaaacaggccggcgatgtggaagagaatccaggccccatgtacccctacgacgtgccagactacgcccctaagaagaagagaaaagtcggcggctctggcggcggaggatctggcggaggtggaagcggaggaacccagaccaacggcttccctctggaactgctgaccagacctgctcctgagagactggcctacttcgagaactacaccgtgggacaccccagactgaaagaggtgtccgagatcctgatgcggacaatcgctgaacctgccggcgctagcttcatcttcgtgtatggacctagcggcgtgggcaagaccacactgagactgagagtggaacagaaactgaccgagctggtgctgcccctgctggaatctgatagaggcagagtgcctgtcgtgggcgttgaagctgtggcccctgagagcagaaacttcaactggaaggactactacacacgggccctgatcgccctggaagaacctctgatcgaccacaagttcgactacggcgtgcggggcatcagcagagacaacttcggcaagatcaacgtggaaagcaaggtggtggccccagctctgagaagggccctcgaaaatgccctgatccacagacaccccgacgtgttctttgtggacgaggcccagcactttggcaagatggccagcggctacaagctgcaggatcagctggattgcctgaagtccctggccaacatgaccggcatcctgcactgtctgctgggcacatacgagctgctgaccttcagaaacctgagcggccagctgtctcggagaagcgtggacatccacttcagacggtactgcgccgagaatcccgaagatgtgcaggccttcaagagcgtgctgctgactttccagcagcagatgcctctggccgaggctcctgatctggtgtctcactgggagtacttctacgagagaaccctgggctgcgtgggcatcctgaagaactggctgacaagagccctgaaggacgccctggatagagaagccaccaccgtgacactgaaggacctgcagaaacgcgcttggagcgtggcccagtgccagcggatgttcaaagagatccaagagggcgaaagacagctgagcgagacagagacagacatccagaacctgagatctgccctcggcctgggagccaagcctattgtgctgcctgaggaaacccctaagaccaccagacctccaggcaaagtgggcaaaagaaagcccaagagggaccccatcggagtgcagcaggatgtgtcttgacctcaggtgcaggctgcctatcagaaggtggtggctggtgtggccaatgccctggctcacaaataccactgagatctttttccctctgccaaaaattatggggacatcatgaagccccttgagcatctgacttctggctaataaaggaaatttattttcattgcaatagtgtgttggaattttttgtgtctctcactcggaaggacatatgggagggcaaatcatttaaaacatcagaatgagtatttggtttagagtttggcaacatatgcccatatgctggctgccatgaacaaaggttggctataaagaggtcatcagtatatgaaacagccccctgctgtccattccttattccatagaaaagccttgacttgaggttagattttttttatattttgttttgtgttatttttttctttaacatccctaaaattttccttacatgttttactagccagatttttcctcctctcctgactactcccagtcatagctgtccctcttctcttatggagatccctcgacctgcagcccaagcttggcgtaatcatggtcatagctgtttcctgtgtgaaattgttatccgctcacaattccacacaacatacgagccggaagcataaagtgtaaagcctggggtgcctaatgagtgagctaactcacattaattgcgttgcgctcactgcccgctttccagtcgggaaacctgtcgtgccagcggatccattccacagaattaaaaaattgagcaacgcctaacggcatcaagccacgaatcacaggcgtcgcgctggcgggcattcctgaagctgacagttgagcaacgcctaacggcatcaagccacgaatcacgtcctttccacaagatatataaagccaagaaatcgaaatactttcaagttacggtaagcatatgatagtccattttaaaacataattttaaaactgcaaactacccaagaaattattactttctacgtcacgtattttgtactaatatctttgtgtttacagtcaaattaattctaattatctctctaacagccttgtatcgtatatgcaaatatgaaggaatcatgggaaataggccctccgctgcattaatgaatcggccaacgcgcggggagaggcggtttgcgtattgggcgctgttccgcttcctcgctcactgactcgctgcgctcggtcgttcggctgcggcgagcggtatcagctcactcaaaggcggtaatacggttatccacagaatcaggggataacgcaggaaagaacatgtgagcaaaaggccagcaaaaggccaggaaccgtaaaaaggccgcgttgctggcgtttttccataggctccgcccccctgacgagcatcacaaaaatcgacgctcaagtcagaggtggcgaaacccgacaggactataaagataccaggcgtttccccctggaagctccctcgtgcgctctcctgttccgaccctgccgcttaccggatacctgtccgcctttctcccttcgggaagcgtggcgctttctcatagctcacgctgtaggtatctcagttcggtgtaggtcgttcgctccaagctgggctgtgtgcacgaaccccccgttcagcccgaccgctgcgccttatccggtaactatcgtcttgagtccaacccggtaagacacgacttatcgccactggcagcagccactggtaacaggattagcagagcgaggtatgtaggcggtgctacagagttcttgaagtggtggcctaactacggctacactagaagaacagtatttggtatctgcgctctgctgaagccagttaccttcggaaaaagagttggtagctcttgatccggcaaacaaaccaccgctggtagcggtggtttttttgtttgcaagcagcagattacgcgcagaaaaaaaggatctcaagaagatcctttgatcttttctacggggtctgacgctcagtggaacgaaaactcacgttaagggattttggtcatgagattatcaaaaaggatcttcacctagatccttttaaattaaaaatgaagttttaaatcaatctaaagtatatatgagtaaacttggtctgacagttaccaatgcttaatcagtgaggcacctatctcagcgatctgtctatttcgttcatccatagttgcctgactccccgtcgtgtagataactacgatacgggagggcttaccatctggccccagtgctgcaatgataccgcgagaaccacgctcaccggctccagatttatcagcaataaaccagccagccggaagggccgagcgcagaagtggtcctgcaactttatccgcctccatccagtctattaattgttgccgggaagctagagtaagtagttcgccagttaatagtttgcgcaacgttgttgccattgctacaggcatcgtggtgtcacgctcgtcgtttggtatggcttcattcagctccggttcccaacgatcaaggcgagttacatgatcccccatgttgtgcaaaaaagcggttagctccttcggtcctccgatcgttgtcagaagtaagttggccgcagtgttatcactcatggttatggcagcactgcataattctcttactgtcatgccatccgtaagatgcttttctgtgactggtgagtactcaaccaagtcattctgagaatagtgtatgcggcgaccgagttgctcttgcccggcgtcaatacgggataataccgcgccacatagcagaactttaaaagtgctcatcattggaaaacgttcttcggggcgaaaactctcaaggatcttaccgctgttgagatccagttcgatgtaacccactcgtgcacccaactgatcttcagcatcttttactttcaccagcgtttctgggtgagcaaaaacaggaaggcaaaatgccgcaaaaaagggaataagggcgacacggaaatgttgaatactcatactcttcctttttcaatattattgaagcatttatcagggttattgtctcatgagcggatacatatttgaatgtatttagaaaaataaacaaataggggttccgcgcacatttccccgaaaagtgccacctgggtcgacattgattattgactagtaatagtaatcaattacggggtcattagttcatagcccatatatggagttccgcgttacataacttacggtaaatggcc

SEQ ID NO: 748 - DNA, 14517 bp, synthetic construct
  misc_feature 1..14517: note = Synthetic
  source 1..14517: mol_type = other DNA
cgcctggctgaccgcccaacgacccccgcccattgacgtcaataatgacgtatgttcccatagtaacgccaatagggactttccattgacgtcaatgggtggagtatttacggtaaactgcccacttggcagtacatcaagtgtatcatatgccaagtacgccccctattgacgtcaatgacggtaaatggcccgcctggcattatgcccagtacatgaccttatgggactttcctacttggcagtacatctacgtattagtcatcgctattaccatggtgatgcggttttggcagtacatcaatgggcgtggatagcggtttgactcacggggatttccaagtctccaccccattgacgtcaatgggagtttgttttggcaccaaaatcaacgggactttccaaaatgtcgtaacaactccgccccattgacgcaaatgggcggtaggcgtgtacggtgggaggtctatataagcagagctggtttagtgaaccgtcagatccgctagcgctaccggactcagatcgccaccatgcccaagaagaaacggaaagtgggctccggggtggccacacagcccaagatcagcctgtctctggatgccgccgacaccaccatcatgcacagagttggaatggccggcctgtacatgaccctgaagcggctggaaaagcagtaccccagcagcagacagagaggcggccacatttcttggagcctgaccgccgataccatcgagctgttttggcagggcagcgactttgtggccctgagctggctgatcaaagagagctttcagctggacgacaccggcctgatccacctgacaggcctggacaacgacgccatcaacctgagccagaagatccacatccacgagggaatctgcgccgtgttcctgcggctgaacaagttttaccaggccggcgagatcgtgaacaccgagctgacagtggaagagaagaaggtggaataccagtacaagagcctgacttggtacgcccaccaggcctttgccgagaagctgtgcgaagccgatacacagcagctgcggcacgactacgtgcagatcacaagctggctgtacctcggcggaattgtgcggcatgccagaacacagaacaccaccaagctggaagaaaagcccgagtacgccctggctctgctgtttgtgcctgtcgtgtgccactactgcctgctgcacatccctagcgaggacctgaaagagaaaaagccccacagatacctggtggtcatccccgagatcaaggacttcgaggatgccagccagagaagatggcggctgcagcagctggaaacaaagcagctgcacgtgtccagcctgggagaagccggcctgctgtactacagcctggacgatattcagcccgagggcgactactaccaggcctgccaagtttggctgtacgagaagatgaaccaggccagccggcagagaaccctgatgagcatcgaggaaatcgagatcgacaagaacaccctgatcacctaccagcaggtccagaagtactttcagcccaactatcagaagatcgagtacaagcagatcttcatcaaagtgaaccccattcggtccctgatcgccgacaatctggtcaccggaatccactggtggtccaacttttgggagaaactggtcatcgaggacagcaaagagtacctgttcaaccagatcttccccaaccgcgagggcttcatcagaatggccgagaacagcgaagaggacaagcactacctgatctttatcaaggtgttccagcaggccatgaagggcaacttcgccaagatgtacgccaaggccgaggacggcaaggaccctcctatcaagaaaaaagtggaacggctgcgggccgagctgaactactgttacgatgagctgagcttcaaagagtatctgagcgacttcctcgtcagaggtggcctgaacaaatacctgaaccagaatcaggccgagatcctgctgctgatcaagaagctgccctggcaagagctgagaatctgggccctgctggccattgccagctacaagcccaaagagaagcccatcagcaaggacgacagcctgacactgaacaaccagcagctcgaagagatgaacgacgagagcgaggaagagggctccgggtccggggggtccggggccacaaacttttccctgctgaagcaggctggcgacgtggaggaaaaccccggacctatgcctaagaagaaaagaaaagtgggcagcggagtcaaccccagaggcatgaccatctacctggaacactggaacctgaagcctctggaaatccctcagcggagccggctgtttagcctggaaccagtggctgtgggcacaccttatgccgagagcctgagcagctacctgcacagactggcccaggctcactgtctgaccagccagaaactggtcatgggcgagatcgcccctctgatcctgaaggacgaggacaagagcgagctgctgagcaagaacctgagccatctgctgggcaacagcgacgccaagcctaccatcaacggcatgagagagatgaccggcaagctggtcaccatcctggaagaactgaccatgcggcaggacctgcggtttctgacactgctgtcttggaagggcatgatctacgacaagggcctgttccgcaactacagagcctggtgtccttgctgctgggaagagtggatgcgcgagaacaagacaatctacgagcccctgctgtggtccttcaaggacgtggaattctgcgtgatccacaagcagcggctgatcgaggaatgccctcactgtggcagcagactgcccatcatggccaagtttagccctgccggcttctgcagcagatgctatggatggctgggccaagaagtgaagggcgaagaggaaatcgagaagtaccgcgtgaacatccagggcatctccgagctgattgccctgacacctcagctgggctacgagcctattcctatcgagctgacccggaaactgcagctgatcctgctggtgttcgagcaggccatcggcaaggatctgaacctgctgggcgatctgggcagaatcatggaaagcctgcggatcgccagcaagaccaaccagaaccagccttaccacctggtcaagctgatcatccccgtgtgcgagaaggccaagatcagcgtgtcccagctgttcggcctggactttcaagagctgggcaagatcctgttcggcaatttctccctggaactgaaactggggagcggctctggaggctctggagccacaaatttctctctgctgaaacaggctggggatgtggaggaaaatcctggacccatgcccaagaagaagaggaaggtgggatccggcgccgctctgctgatccagagcgaggaatacgtggacctgaccttcaagctgagaggcgcccctattcctctggacaacggctacgtgatctacagcgccctgagcagaatctgccccatcctgcacgagctggacaacatcggcattcaccctatcgccggcattcccaccagaaacaacctgctggaactgacagcccagagccggctgaaagtgcggattcaccaccagcagatccctctgatctacccctatctggccggacagaccttccacatcggccagaatagctaccagctggacatccccgactacaagcccctgatcagcagcgagagcgtgtacagcagactggtcatcatcaccggcttccaagagcctaccaacttcatcgaggccgtgcagcggaagctggataacaagggcatccagggcaagatcgagctgctgaccagacaggatggcacccctcagaagagacagctgaccatcaacaagcagggcaagcagttcaaagtgcgcggctttggcgtgcggatcagcgagctgaatcctgaggatagcctgacactgcaagagcagggcatctccggcaagcggaagatgatgtgcggcatcttcgtgcccgccaccagatccaaagaggaagaggaaaccggctctggaagcggcggaagcggcgctaccaactttagcctgctgaagcaggccggcgacgtggaggaaaacccagggcccatgcccaaaaagaagcggaaagtgggctccgggacagcccctctgatcctgtacctggatgtgcccttcgccaccttcagagagtctcacgccagagagatgggcaagacataccccgttcctccaccagccacagtgtacggcatgctgctgtctctcgtgggcgagacagacgtgtacagacactgcggagtggaactggccattgccatgctgagcatccccaagaagtcccggatcctgcggcagatgcggagattcaagaacgccgacttctctcaccccgagaacgtgatcccttgctaccaagagatcctgagcaacctgaagtgcctgatctgggtccgaagcgagggcgagaagatccagcctagcctgagagagagaatccagctggccctggatcaccctgaactcgtcagaagattcggctgcctgttcctgggcgagagcgaccagctgatcaagagcatcaagctggtgtcccaggactacctgcagggcgtcagacagtgggtcatcagagacaacagaggctggctgaccctgccttactgggttgaccacgtgggcagcagaaatacccggttcctgagataccggatcgaggaaatccctagcagccctcctcctgacctggcctggacaatgattcagagccccatcggaagcgggtccggagggtccggagccactaatttctccctgctgaaacaggcaggcgatgtggaagagaatcccgggcctatgcccaaaaagaaaaggaaggtgggatccggcatgagccagaagaagaacgacaacaacatccccaactactacctgtacggcaccgtgctgaccagatacggactggccagcctgaaccacgacatgcggagaggcaacaagaccacactgcagaaaggctactggaacggcaagatccacagcttcgtgggcagcagcgccattagatgggccctgaggttctatctgcagaaacagggctacctggtcaacagagtgtgggacgaagatgagcacatcaaccggctgaccaacgaggacttcgaccccgagcagttctacgacgacgacatcttcggcttcgccctgctggaaagcgccgagatcgaggaagagacaagcaccaccaagcggaagaagaagcagaccaagaccagcacaccccaccagagaatgggagccctggccatgaatatggccgtgtctctgaccccttacgatggcgccgtgaagctgggagccaagtctggcagagagaaggacagcaccagcctgcacttcaccgagtaccacgccaccagataccagtactacttcggcatcaacgccacacacctgaaggacttcagccggatcctgcctgtgatcgacggcatcatgaacctgcctaaagtcggcggcaacagcaatatcttcaactaccctttctgccccgacagcctggtgctgcagtggaccaacaatttcgccagctacatcagctactgcttcgagtactgcgaccctcagagcaaagaggccaagttcacccaagagttcatcgacgaggtggaatgcggccagatcgagccttctcagctctggatcggcggcaccatcgtgaaggatctgcagcagctggacaacttcgacgacagccccttcaagaaggcccacatctaccggaaccggaacgagctgatcgagaacctgaaaaccgtgatcacccggaacctgggcctcgaggaatccaagggatccggaagcgggggaagcggggccactaacttttctctgctgaagcaggcaggggacgtggaagagaaccctggccccatgtacccctacgacgtgccagactacgcccctaagaagaagagaaaagtcggcggctctggcggcggaggatctggcggaggtggaagcggaggaaaggaacagttcgagcagtgggtcgcccggctgcagatttctgaagccggccagaaaatcatcgagaaagtgcggagcagcgagcccagcagaagagttggcggcggaagcaaaaatgtggccggcagataccccagccggaagatgggagtgaccatccagttcgagagccacagagtggaactgcccgtgatctaccagctggaacacgacgaggacgtgctggaattctacgaccagcctcctcagatcaagctggactaccaggccagcaatggcagacgactgggagtgctgcacacccctgatctgttcgtgatcaggaccaatagcgccggctgggaagagtgcaagaccgagcaggatctgaagaagctggcccagaagaaccccaaccggtacttctacagccaagaggacaaccagtggcactgccctccaggcgaagtgtacgccgatcagttcggcctgtactaccggatcagaagcgacaaagaaatcaactgggtgctgcagcggaacctgcagttcctggaagattactaccgcagcgagagcctgggcgtcgaacaggctattgctcagtctctgctggccatcgtgtctagccagcctggaattacactggccgagctgctgcatcagcagacaggcgccaagagcgacgacatctacaccctgatcgtgcaagagcagatctacttcgacctgaacgccgctcctctggctgagcctgagagatgcctgatcttcagggatgagcagaccgccagcgcctacagactgatggtggaacagcccaacgtgtccctgcctgccatctctcccgtgatcaatatcgccaccggcacacccgtgtcctgggatggaaagggcctgaacatcatcctcgtgggcgagacagaagtgatcctgggcgccgagaatgaccagctgatcaagttcaagaaaaacgtgttcgaggaactcgtgcggcagggcgagatcacatctctgcagaccccagagaaaaccgacatcagcaccgagagctggcagcggttttaccaggcctctccagaggatcaggccgaggctctggaacggtacaagaccatcgagccctacctgaacggacaccctcctgagaacgagacaatccccgccagaaccatcagagactggaaggccaagtacctgacagccctgcagaagtacggctgcggctatatcggcctgctgtcccacagaagcgtgaagggcaacagacagagaaagctgcccgaggacaccctggccatcatggaaagattcattctcgaggactacgagacactgaagcagaaacggatgctggaagtgtatggcgccctggtgctggcttgtgaacagagcagtgtgatcgcccctagctacaaggccttcaccaaagaagtgaagcggcggaccggctacgagcagaccaagaagagacaaggcagaagggccgcctaccagtacgagagcttttactgggagctgacccagaaaacaccccggcacggcgatagacctttcgagatcggacacatcgatcacacccagctggacgtggaacttgtgtgctccagaaccggcagaaacctgggcagaccttgggccacctttctggtggatgcctactctagaaggctgctggccgtgtacctgaccttcgacagcccaagctaccggtcctgtctgatggtgctgcggatctgcgtgaagaggcatggcagactgcctcagatcgtggtggtggacaatggcaccgagttccacagcgtgtacttcgaaaccctgctggctaccttcgagtgcaccaagaagcagcggcctccagccaaggccagatttggcagcgtgtgcgagagactgttcggcaccagcaacacccagttcgtgcacaacctgctgggcaatacccagatcacccggaacgtgcggcaagtgaccaagagcgtgaaccccaagaatcaggccgtgtggacactgggactgctgtacgagtatctgtgcgcctgggcctacgaggtgtacgacacagatgaacaccccgctctgtttcagagccccagggatgcttttgccgccggaatggtcacaagcggcagcagactgcaccggatgatcccttacgacgagaacttccagatcctgacactgcccaccaccagcgagggcaaagccaaggtgcaagttggcagaggcgtgaagatcaacagcatctactactggtccaacagcttcagggacccacagatcgagaacaccagcgtgcccaccagatacgaccccttcaacatcggaatcgcctacgccttcgtcagaggccagtgggtgcagtgcatcagccagtactacagccagctgcagggcagatccgagaaagagctgaagctggctagcgccgagctgagaaagagaagcagcaactacggcagacagagccaggtgtccgccaagaacctggccgaatttctggccagcgtcgaggcccaagagacactgctggaacagagaagctacgacgccgaggccagagaagtgttcatcgtgatcgaaggcggcaaggccgccaccagcagaaatgagcagcctaagctgatccaggtgccgtttgagaacaccgacacacaggtggccgaggacgaggccattacacctgaaacactggtggtgtacgaggaattcagcctgtgactagcaacgttactggccgaagccgcttggaataaggccggtgtgcgtttgtctatatgttattttccaccatattgccgtcttttggcaatgtgagggcccggaaacctggccctgtcttcttgacgagcattcctaggggtctttcccctctcgccaaaggaatgcaaggtctgttgaatgtcgtgaaggaagcagttcctctggaagcttcttgaagacaaacaacgtctgtagcgaccctttgcaggcagcggaaccccccacctggcgacaggtgcctctgcggccaaaagccacgtgtataagatacacctgcaaaggcggcacaaccccagtgccacgttgtgagttggatagttgtggaaagagtcaaatggctctcctcaagcgtattcaacaaggggctgaaggatgcccagaaggtaccccattgtatgggatctgatctggggcctcggtgcacatgctttacatgtgtttagtcgaggttaaaaaaacgtctaggccccccgaaccacggggacgtggttttcctttgaaaaacacgatgataatatggccacaaccatggtgagcaagggcgaggagctgttcaccggggtggtgcccatcctggtcgagctggacggcgacgtaaacggccacaagttcagcgtgtccggcgagggcgagggcgatgccacctacggcaagctgaccctgaagttcatctgcaccaccggcaagctgcccgtgccctggcccaccctcgtgaccaccctgacctacggcgtgcagtgcttcagccgctaccccgaccacatgaagcagcacgacttcttcaagtccgccatgcccgaaggctacgtccaggagcgcaccatcttcttcaaggacgacggcaactacaagacccgcgccgaggtgaagttcgagggcgacaccctggtgaaccgcatcgagctgaagggcatcgacttcaaggaggacggcaacatcctggggcacaagctggagtacaactacaacagccacaacgtctatatcatggccgacaagcagaagaacggcatcaaggtgaacttcaagatccgccacaacatcgaggacggcagcgtgcagctcgccgaccactaccagcagaacacccccatcggcgacggccccgtgctgctgcccgacaaccactacctgagcacccagtccgccctgagcaaagaccccaacgagaagcgcgatcacatggtcctgctggagttcgtgaccgccgccgggatcactctcggcatggacgagctgtacaagggcagcggcagcggcgcaaccaatttcagcctgctgaaacaggccggcgatgtggaagagaatccaggccccatgtacccctacgacgtgccagactacgcccctaagaagaagagaaaagtcggcggctctggcggcggaggatctggcggaggtggaagcggaggaacccagaccaacggcttccctctggaactgctgaccagacctgctcctgagagactggcctacttcgagaactacaccgtgggacaccccagactgaaagaggtgtccgagatcctgatgcggacaatcgctgaacctgccggcgctagcttcatcttcgtgtatggacctagcggcgtgggcaagaccacactgagactgagagtggaacagaaactgaccgagctggtgctgcccctgctggaatctgatagaggcagagtgcctgtcgtgggcgttgaagctgtggcccctgagagcagaaacttcaactggaaggactactacacacgggccctgatcgccctggaagaacctctgatcgaccacaagttcgactacggcgtgcggggcatcagcagagacaacttcggcaagatcaacgtggaaagcaaggtggtggccccagctctgagaagggccctcgaaaatgccctgatccacagacaccccgacgtgttctttgtggacgaggcccagcactttggcaagatggccagcggctacaagctgcaggatcagctggattgcctgaagtccctggccaacatgaccggcatcctgcactgtctgctgggcacatacgagctgctgaccttcagaaacctgagcggccagctgtctcggagaagcgtggacatccacttcagacggtactgcgccgagaatcccgaagatgtgcaggccttcaagagcgtgctgctgactttccagcagcagatgcctctggccgaggctcctgatctggtgtctcactgggagtacttctacgagagaaccctgggctgcgtgggcatcctgaagaactggctgacaagagccctgaaggacgccctggatagagaagccaccaccgtgacactgaaggacctgcagaaacgcgcttggagcgtggcccagtgccagcggatgttcaaagagatccaagagggcgaaagacagctgagcgagacagagacagacatccagaacctgagatctgccctcggcctgggagccaagcctattgtgctgcctgaggaaacccctaagaccaccagacctccaggcaaagtgggcaaaagaaagcccaagagggaccccatcggagtgcagcaggatgtgtcttgacctcaggtgcaggctgcctatcagaaggtggtggctggtgtggccaatgccctggctcacaaataccactgagatctttttccctctgccaaaaattatggggacatcatgaagccccttgagcatctgacttctggctaataaaggaaatttattttcattgcaatagtgtgttggaattttttgtgtctctcactcggaaggacatatgggagggcaaatcatttaaaacatcagaatgagtatttggtttagagtttggcaacatatgcccatatgctggctgccatgaacaaaggttggctataaagaggtcatcagtatatgaaacagccccctgctgtccattccttattccatagaaaagccttgacttgaggttagattttttttatattttgttttgtgttatttttttctttaacatccctaaaattttccttacatgttttactagccagatttttcctcctctcctgactactcccagtcatagctgtccctcttctcttatggagatccctcgacctgcagcccaagcttggcgtaatcatggtcatagctgtttcctgtgtgaaattgttatccgctcacaattccacacaacatacgagccggaagcataaagtgtaaagcctggggtgcctaatgagtgagctaactcacattaattgcgttgcgctcactgcccgctttccagtcgggaaacctgtcgtgccagcggatccattccacagaattaaaaaattgagcaacgcctaacggcatcaagccacgaatcacaggcgtcgcgctggcgggcattcctgaagctgacagttgagcaacgcctaacggcatcaagccacgaatcacgtcctttccacaagatatataaagccaagaaatcgaaatactttcaagttacggtaagcatatgatagtccattttaaaacataattttaaaactgcaaactacccaagaaattattactttctacgtcacgtattttgtactaatatctttgtgtttacagtcaaattaattctaattatctctctaacagccttgtatcgtatatgcaaatatgaaggaatcatgggaaataggccctccgctgcattaatgaatcggccaacgcgcggggagaggcggtttgcgtattgggcgctgttccgcttcctcgctcactgactcgctgcgctcggtcgttcggctgcggcgagcggtatcagctcactcaaaggcggtaatacggttatccacagaatcaggggataacgcaggaaagaacatgtgagcaaaaggccagcaaaaggccaggaaccgtaaaaaggccgcgttgctggcgtttttccataggctccgcccccctgacgagcatcacaaaaatcgacgctcaagtcagaggtggcgaaacccgacaggactataaagataccaggcgtttccccctggaagctccctcgtgcgctctcctgttccgaccctgccgcttaccggatacctgtccgcctttctcccttcgggaagcgtggcgctttctcatagctcacgctgtaggtatctcagttcggtgtaggtcgttcgctccaagctgggctgtgtgcacgaaccccccgttcagcccgaccgctgcgccttatccggtaactatcgtcttgagtccaacccggtaagacacgacttatcgccactggcagcagccactggtaacaggattagcagagcgaggtatgtaggcggtgctacagagttcttgaagtggtggcctaactacggctacactagaagaacagtatttggtatctgcgctctgctgaagccagttaccttcggaaaaagagttggtagctcttgatccggcaaacaaaccaccgctggtagcggtggtttttttgtttgcaagcagcagattacgcgcagaaaaaaaggatctcaagaagatcctttgatcttttctacggggtctgacgctcagtggaacgaaaactcacgttaagggattttggtcatgagattatcaaaaaggatcttcacctagatccttttaaattaaaaatgaagttttaaatcaatctaaagtatatatgagtaaacttggtctgacagttaccaatgcttaatcagtgaggcacctatctcagcgatctgtctatttcgttcatccatagttgcctgactccccgtcgtgtagataactacgatacgggagggcttaccatctggccccagtgctgcaatgataccgcgagaaccacgctcaccggctccagatttatcagcaataaaccagccagccggaagggccgagcgcagaagtggtcctgcaactttatccgcctccatccagtctattaattgttgccgggaagctagagtaagtagttcgccagttaatagtttgcgcaacgttgttgccattgctacaggcatcgtggtgtcacgctcgtcgtttggtatggcttcattcagctccggttcccaacgatcaaggcgagttacatgatcccccatgttgtgcaaaaaagcggttagctccttcggtcctccgatcgttgtcagaagtaagttggccgcagtgttatcactcatggttatggcagcactgcataattctcttactgtcatgccatccgtaagatgcttttctgtgactggtgagtactcaaccaagtcattctgagaatagtgtatgcggcgaccgagttgctcttgcccggcgtcaatacgggataataccgcgccacatagcagaactttaaaagtgctcatcattggaaaacgttcttcggggcgaaaactctcaaggatcttaccgctgttgagatccagttcgatgtaacccactcgtgcacccaactgatcttcagcatcttttactttcaccagcgtttctgggtgagcaaaaacaggaaggcaaaatgccgcaaaaaagggaataagggcgacacggaaatgttgaatactcatactcttcctttttcaatattattgaagcatttatcagggttattgtctcatgagcggatacatatttgaatgtatttagaaaaataaacaaataggggttccgcgcacatttccccgaaaagtgccacctgggtcgacattgattattgactagtaatagtaatcaattacggggtcattagttcatagcccatatatggagttccgcgttacataacttacggtaaatggcc

SEQ ID NO: 749 - DNA, 14517 bp, synthetic construct
  misc_feature 1..14517: note = Synthetic
  source 1..14517: mol_type = other DNA
cgcctggctgaccgcccaacgacccccgcccattgacgtcaataatgacgtatgttcccatagtaacgccaatagggactttccattgacgtcaatgggtggagtatttacggtaaactgcccacttggcagtacatcaagtgtatcatatgccaagtacgccccctattgacgtcaatgacggtaaatggcccgcctggcattatgcccagtacatgaccttatgggactttcctacttggcagtacatctacgtattagtcatcgctattaccatggtgatgcggttttggcagtacatcaatgggcgtggatagcggtttgactcacggggatttccaagtctccaccccattgacgtcaatgggagtttgttttggcaccaaaatcaacgggactttccaaaatgtcgtaacaactccgccccattgacgcaaatgggcggtaggcgtgtacggtgggaggtctatataagcagagctggtttagtgaaccgtcagatccgctagcgctaccggactcagatcgccaccatgcccaagaagaaacggaaagtgggctccggggtggccacacagcccaagatcagcctgtctctggatgccgccgacaccaccatcatgcacagagttggaatggccggcctgtacatgaccctgaagcggctggaaaagcagtaccccagcagcagacagagaggcggccacatttcttggagcctgaccgccgataccatcgagctgttttggcagggcagcgactttgtggccctgagctggctgatcaaagagagctttcagctggacgacaccggcctgatccacctgacaggcctggacaacgacgccatcaacctgagccagaagatccacatccacgagggaatctgcgccgtgttcctgcggctgaacaagttttaccaggccggcgagatcgtgaacaccgagctgacagtggaagagaagaaggtggaataccagtacaagagcctgacttggtacgcccaccaggcctttgccgagaagctgtgcgaagccgatacacagcagctgcggcacgactacgtgcagatcacaagctggctgtacctcggcggaattgtgcggcatgccagaacacagaacaccaccaagctggaagaaaagcccgagtacgccctggctctgctgtttgtgcctgtcgtgtgccactactgcctgctgcacatccctagcgaggacctgaaagagaaaaagccccacagatacctggtggtcatccccgagatcaaggacttcgaggatgccagccagagaagatggcggctgcagcagctggaaacaaagcagctgcacgtgtccagcctgggagaagccggcctgctgtactacagcctggacgatattcagcccgagggcgactactaccaggcctgccaagtttggctgtacgagaagatgaaccaggccagccggcagagaaccctgatgagcatcgaggaaatcgagatcgacaagaacaccctgatcacctaccagcaggtccagaagtactttcagcccaactatcagaagatcgagtacaagcagatcttcatcaaagtgaaccccattcggtccctgatcgccgacaatctggtcaccggaatccactggtggtccaacttttgggagaaactggtcatcgaggacagcaaagagtacctgttcaaccagatcttccccaaccgcgagggcttcatcagaatggccgagaacagcgaagaggacaagcactacctgatctttatcaaggtgttccagcaggccatgaagggcaacttcgccaagatgtacgccaaggccgaggacggcaaggaccctcctatcaagaaaaaagtggaacggctgcgggccgagctgaactactgttacgatgagctgagcttcaaagagtatctgagcgacttcctcgtcagaggtggcctgaacaaatacctgaaccagaatcaggccgagatcctgctgctgatcaagaagctgccctggcaagagctgagaatctgggccctgctggccattgccagctacaagcccaaagagaagcccatcagcaaggacgacagcctgacactgaacaaccagcagctcgaagagatgaacgacgagagcgaggaagagggctccgggtccggggggtccggggccacaaacttttccctgctgaagcaggctggcgacgtggaggaaaaccccggacctatgcctaagaagaaaagaaaagtgggcagcggagtcaaccccagaggcatgaccatctacctggaacactggaacctgaagcctctggaaatccctcagcggagccggctgtttagcctggaaccagtggctgtgggcacaccttatgccgagagcctgagcagctacctgcacagactggcccaggctcactgtctgaccagccagaaactggtcatgggcgagatcgcccctctgatcctgaaggacgaggacaagagcgagctgctgagcaagaacctgagccatctgctgggcaacagcgacgccaagcctaccatcaacggcatgagagagatgaccggcaagctggtcaccatcctggaagaactgaccatgcggcaggacctgcggtttctgacactgctgtcttggaagggcatgatctacgacaagggcctgttccgcaactacagagcctggtgtccttgctgctgggaagagtggatgcgcgagaacaagacaatctacgagcccctgctgtggtccttcaaggacgtggaattctgcgtgatccacaagcagcggctgatcgaggaatgccctcactgtggcagcagactgcccatcatggccaagtttagccctgccggcttctgcagcagatgctatggatggctgggccaagaagtgaagggcgaagaggaaatcgagaagtaccgcgtgaacatccagggcatctccgagctgattgccctgacacctcagctgggctacgagcctattcctatcgagctgacccggaaactgcagctgatcctgctggtgttcgagcaggccatcggcaaggatctgaacctgctgggcgatctgggcagaatcatggaaagcctgcggatcgccagcaagaccaaccagaaccagccttaccacctggtcaagctgatcatccccgtgtgcgagaaggccaagatcagcgtgtcccagctgttcggcctggactttcaagagctgggcaagatcctgttcggcaatttctccctggaactgaaactggggagcggctctggaggctctggagccacaaatttctctctgctgaaacaggctggggatgtggaggaaaatcctggacccatgcccaagaagaagaggaaggtgggatccggcgccgctctgctgatccagagcgaggaatacgtggacctgaccttcaagctgagaggcgcccctattcctctggacaacggctacgtgatctacagcgccctgagcagaatctgccccatcctgcacgagctggacaacatcggcattcaccctatcgccggcattcccaccagaaacaacctgctggaactgacagcccagagccggctgaaagtgcggattcaccaccagcagatccctctgatctacccctatctggccggacagaccttccacatcggccagaatagctaccagctggacatccccgactacaagcccctgatcagcagcgagagcgtgtacagcagactggtcatcatcaccggcttccaagagcctaccaacttcatcgaggccgtgcagcggaagctggataacaagggcatccagggcaagatcgagctgctgaccagacaggatggcacccctcagaagagacagctgaccatcaacaagcagggcaagcagttcaaagtgcgcggctttggcgtgcggatcagcgagctgaatcctgaggatagcctgacactgcaagagcagggcatctccggcaagcggaagatgatgtgcggcatcttcgtgcccgccaccagatccaaagaggaagaggaaaccggctctggaagcggcggaagcggcgctaccaactttagcctgctgaagcaggccggcgacgtggaggaaaacccagggcccatgcccaaaaagaagcggaaagtgggctccgggatgagccagaagaagaacgacaacaacatccccaactactacctgtacggcaccgtgctgaccagatacggactggccagcctgaaccacgacatgcggagaggcaacaagaccacactgcagaaaggctactggaacggcaagatccacagcttcgtgggcagcagcgccattagatgggccctgaggttctatctgcagaaacagggctacctggtcaacagagtgtgggacgaagatgagcacatcaaccggctgaccaacgaggacttcgaccccgagcagttctacgacgacgacatcttcggcttcgccctgctggaaagcgccgagatcgaggaagagacaagcaccaccaagcggaagaagaagcagaccaagaccagcacaccccaccagagaatgggagccctggccatgaatatggccgtgtctctgaccccttacgatggcgccgtgaagctgggagccaagtctggcagagagaaggacagcaccagcctgcacttcaccgagtaccacgccaccagataccagtactacttcggcatcaacgccacacacctgaaggacttcagccggatcctgcctgtgatcgacggcatcatgaacctgcctaaagtcggcggcaacagcaatatcttcaactaccctttctgccccgacagcctggtgctgcagtggaccaacaatttcgccagctacatcagctactgcttcgagtactgcgaccctcagagcaaagaggccaagttcacccaagagttcatcgacgaggtggaatgcggccagatcgagccttctcagctctggatcggcggcaccatcgtgaaggatctgcagcagctggacaacttcgacgacagccccttcaagaaggcccacatctaccggaaccggaacgagctgatcgagaacctgaaaaccgtgatcacccggaacctgggcctcgaggaatccaagggaagcgggtccggagggtccggagccactaatttctccctgctgaaacaggcaggcgatgtggaagagaatcccgggcctatgcccaaaaagaaaaggaaggtgggatccggcacagcccctctgatcctgtacctggatgtgcccttcgccaccttcagagagtctcacgccagagagatgggcaagacataccccgttcctccaccagccacagtgtacggcatgctgctgtctctcgtgggcgagacagacgtgtacagacactgcggagtggaactggccattgccatgctgagcatccccaagaagtcccggatcctgcggcagatgcggagattcaagaacgccgacttctctcaccccgagaacgtgatcccttgctaccaagagatcctgagcaacctgaagtgcctgatctgggtccgaagcgagggcgagaagatccagcctagcctgagagagagaatccagctggccctggatcaccctgaactcgtcagaagattcggctgcctgttcctgggcgagagcgaccagctgatcaagagcatcaagctggtgtcccaggactacctgcagggcgtcagacagtgggtcatcagagacaacagaggctggctgaccctgccttactgggttgaccacgtgggcagcagaaatacccggttcctgagataccggatcgaggaaatccctagcagccctcctcctgacctggcctggacaatgattcagagccccatcggatccggaagcgggggaagcggggccactaacttttctctgctgaagcaggcaggggacgtggaagagaaccctggccccatgtacccctacgacgtgccagactacgcccctaagaagaagagaaaagtcggcggctctggcggcggaggatctggcggaggtggaagcggaggaaaggaacagttcgagcagtgggtcgcccggctgcagatttctgaagccggccagaaaatcatcgagaaagtgcggagcagcgagcccagcagaagagttggcggcggaagcaaaaatgtggccggcagataccccagccggaagatgggagtgaccatccagttcgagagccacagagtggaactgcccgtgatctaccagctggaacacgacgaggacgtgctggaattctacgaccagcctcctcagatcaagctggactaccaggccagcaatggcagacgactgggagtgctgcacacccctgatctgttcgtgatcaggaccaatagcgccggctgggaagagtgcaagaccgagcaggatctgaagaagctggcccagaagaaccccaaccggtacttctacagccaagaggacaaccagtggcactgccctccaggcgaagtgtacgccgatcagttcggcctgtactaccggatcagaagcgacaaagaaatcaactgggtgctgcagcggaacctgcagttcctggaagattactaccgcagcgagagcctgggcgtcgaacaggctattgctcagtctctgctggccatcgtgtctagccagcctggaattacactggccgagctgctgcatcagcagacaggcgccaagagcgacgacatctacaccctgatcgtgcaagagcagatctacttcgacctgaacgccgctcctctggctgagcctgagagatgcctgatcttcagggatgagcagaccgccagcgcctacagactgatggtggaacagcccaacgtgtccctgcctgccatctctcccgtgatcaatatcgccaccggcacacccgtgtcctgggatggaaagggcctgaacatcatcctcgtgggcgagacagaagtgatcctgggcgccgagaatgaccagctgatcaagttcaagaaaaacgtgttcgaggaactcgtgcggcagggcgagatcacatctctgcagaccccagagaaaaccgacatcagcaccgagagctggcagcggttttaccaggcctctccagaggatcaggccgaggctctggaacggtacaagaccatcgagccctacctgaacggacaccctcctgagaacgagacaatccccgccagaaccatcagagactggaaggccaagtacctgacagccctgcagaagtacggctgcggctatatcggcctgctgtcccacagaagcgtgaagggcaacagacagagaaagctgcccgaggacaccctggccatcatggaaagattcattctcgaggactacgagacactgaagcagaaacggatgctggaagtgtatggcgccctggtgctggcttgtgaacagagcagtgtgatcgcccctagctacaaggccttcaccaaagaagtgaagcggcggaccggctacgagcagaccaagaagagacaaggcagaagggccgcctaccagtacgagagcttttactgggagctgacccagaaaacaccccggcacggcgatagacctttcgagatcggacacatcgatcacacccagctggacgtggaacttgtgtgctccagaaccggcagaaacctgggcagaccttgggccacctttctggtggatgcctactctagaaggctgctggccgtgtacctgaccttcgacagcccaagctaccggtcctgtctgatggtgctgcggatctgcgtgaagaggcatggcagactgcctcagatcgtggtggtggacaatggcaccgagttccacagcgtgtacttcgaaaccctgctggctaccttcgagtgcaccaagaagcagcggcctccagccaaggccagatttggcagcgtgtgcgagagactgttcggcaccagcaacacccagttcgtgcacaacctgctgggcaatacccagatcacccggaacgtgcggcaagtgaccaagagcgtgaaccccaagaatcaggccgtgtggacactgggactgctgtacgagtatctgtgcgcctgggcctacgaggtgtacgacacagatgaacaccccgctctgtttcagagccccagggatgcttttgccgccggaatggtcacaagcggcagcagactgcaccggatgatcccttacgacgagaacttccagatcctgacactgcccaccaccagcgagggcaaagccaaggtgcaagttggcagaggcgtgaagatcaacagcatctactactggtccaacagcttcagggacccacagatcgagaacaccagcgtgcccaccagatacgaccccttcaacatcggaatcgcctacgccttcgtcagaggccagtgggtgcagtgcatcagccagtactacagccagctgcagggcagatccgagaaagagctgaagctggctagcgccgagctgagaaagagaagcagcaactacggcagacagagccaggtgtccgccaagaacctggccgaatttctggccagcgtcgaggcccaagagacactgctggaacagagaagctacgacgccgaggccagagaagtgttcatcgtgatcgaaggcggcaaggccgccaccagcagaaatgagcagcctaagctgatccaggtgccgtttgagaacaccgacacacaggtggccgaggacgaggccattacacctgaaacactggtggtgtacgaggaattcagcctgtgactagcaacgttactggccgaagccgcttggaataaggccggtgtgcgtttgtctatatgttattttccaccatattgccgtcttttggcaatgtgagggcccggaaacctggccctgtcttcttgacgagcattcctaggggtctttcccctctcgccaaaggaatgcaaggtctgttgaatgtcgtgaaggaagcagttcctctggaagcttcttgaagacaaacaacgtctgtagcgaccctttgcaggcagcggaaccccccacctggcgacaggtgcctctgcggccaaaagccacgtgtataagatacacctgcaaaggcggcacaaccccagtgccacgttgtgagttggatagttgtggaaagagtcaaatggctctcctcaagcgtattcaacaaggggctgaaggatgcccagaaggtaccccattgtatgggatctgatctggggcctcggtgcacatgctttacatgtgtttagtcgaggttaaaaaaacgtctaggccccccgaaccacggggacgtggttttcctttgaaaaacacgatgataatatggccacaaccatggtgagcaagggcgaggagctgttcaccggggtggtgcccatcctggtcgagctggacggcgacgtaaacggccacaagttcagcgtgtccggcgagggcgagggcgatgccacctacggcaagctgaccctgaagttcatctgcaccaccggcaagctgcccgtgccctggcccaccctcgtgaccaccctgacctacggcgtgcagtgcttcagccgctaccccgaccacatgaagcagcacgacttcttcaagtccgccatgcccgaaggctacgtccaggagcgcaccatcttcttcaaggacgacggcaactacaagacccgcgccgaggtgaagttcgagggcgacaccctggtgaaccgcatcgagctgaagggcatcgacttcaaggaggacggcaacatcctggggcacaagctggagtacaactacaacagccacaacgtctatatcatggccgacaagcagaagaacggcatcaaggtgaacttcaagatccgccacaacatcgaggacggcagcgtgcagctcgccgaccactaccagcagaacacccccatcggcgacggccccgtgctgctgcccgacaaccactacctgagcacccagtccgccctgagcaaagaccccaacgagaagcgcgatcacatggtcctgctggagttcgtgaccgccgccgggatcactctcggcatggacgagctgtacaagggcagcggcagcggcgcaaccaatttcagcctgctgaaacaggccggcgatgtggaagagaatccaggccccatgtacccctacgacgtgccagactacgcccctaagaagaagagaaaagtcggcggctctggcggcggaggatctggcggaggtggaagcggaggaacccagaccaacggcttccctctggaactgctgaccagacctgctcctgagagactggcctacttcgagaactacaccgtgggacaccccagactgaaagaggtgtccgagatcctgatgcggacaatcgctgaacctgccggcgctagcttcatcttcgtgtatggacctagcggcgtgggcaagaccacactgagactgagagtggaacagaaactgaccgagctggtgctgcccctgctggaatctgatagaggcagagtgcctgtcgtgggcgttgaagctgtggcccctgagagcagaaacttcaactggaaggactactacacacgggccctgatcgccctggaagaacctctgatcgaccacaagttcgactacggcgtgcggggcatcagcagagacaacttcggcaagatcaacgtggaaagcaaggtggtggccccagctctgagaagggccctcgaaaatgccctgatccacagacaccccgacgtgttctttgtggacgaggcccagcactttggcaagatggccagcggctacaagctgcaggatcagctggattgcctgaagtccctggccaacatgaccggcatcctgcactgtctgctgggcacatacgagctgctgaccttcagaaacctgagcggccagctgtctcggagaagcgtggacatccacttcagacggtactgcgccgagaatcccgaagatgtgcaggccttcaagagcgtgctgctgactttccagcagcagatgcctctggccgaggctcctgatctggtgtctcactgggagtacttctacgagagaaccctgggctgcgtgggcatcctgaagaactggctgacaagagccctgaaggacgccctggatagagaagccaccaccgtgacactgaaggacctgcagaaacgcgcttggagcgtggcccagtgccagcggatgttcaaagagatccaagagggcgaaagacagctgagcgagacagagacagacatccagaacctgagatctgccctcggcctgggagccaagcctattgtgctgcctgaggaaacccctaagaccaccagacctccaggcaaagtgggcaaaagaaagcccaagagggaccccatcggagtgcagcaggatgtgtcttgacctcaggtgcaggctgcctatcagaaggtggtggctggtgtggccaatgccctggctcacaaataccactgagatctttttccctctgccaaaaattatggggacatcatgaagccccttgagcatctgacttctggctaataaaggaaatttattttcattgcaatagtgtgttggaattttttgtgtctctcactcggaaggacatatgggagggcaaatcatttaaaacatcagaatgagtatttggtttagagtttggcaacatatgcccatatgctggctgccatgaacaaaggttggctataaagaggtcatcagtatatgaaacagccccctgctgtccattccttattccatagaaaagccttgacttgaggttagattttttttatattttgttttgtgttatttttttctttaacatccctaaaattttccttacatgttttactagccagatttttcctcctctcctgactactcccagtcatagctgtccctcttctcttatggagatccctcgacctgcagcccaagcttggcgtaatcatggtcatagctgtttcctgtgtgaaattgttatccgctcacaattccacacaacatacgagccggaagcataaagtgtaaagcctggggtgcctaatgagtgagctaactcacattaattgcgttgcgctcactgcccgctttccagtcgggaaacctgtcgtgccagcggatccattccacagaattaaaaaattgagcaacgcctaacggcatcaagccacgaatcacaggcgtcgcgctggcgggcattcctgaagctgacagttgagcaacgcctaacggcatcaagccacgaatcacgtcctttccacaagatatataaagccaagaaatcgaaatactttcaagttacggtaagcatatgatagtccattttaaaacataattttaaaactgcaaactacccaagaaattattactttctacgtcacgtattttgtactaatatctttgtgtttacagtcaaattaattctaattatctctctaacagccttgtatcgtatatgcaaatatgaaggaatcatgggaaataggccctccgctgcattaatgaatcggccaacgcgcggggagaggcggtttgcgtattgggcgctgttccgcttcctcgctcactgactcgctgcgctcggtcgttcggctgcggcgagcggtatcagctcactcaaaggcggtaatacggttatccacagaatcaggggataacgcaggaaagaacatgtgagcaaaaggccagcaaaaggccaggaaccgtaaaaaggccgcgttgctggcgtttttccataggctccgcccccctgacgagcatcacaaaaatcgacgctcaagtcagaggtggcgaaacccgacaggactataaagataccaggcgtttccccctggaagctccctcgtgcgctctcctgttccgaccctgccgcttaccggatacctgtccgcctttctcccttcgggaagcgtggcgctttctcatagctcacgctgtaggtatctcagttcggtgtaggtcgttcgctccaagctgggctgtgtgcacgaaccccccgttcagcccgaccgctgcgccttatccggtaactatcgtcttgagtccaacccggtaagacacgacttatcgccactggcagcagccactggtaacaggattagcagagcgaggtatgtaggcggtgctacagagttcttgaagtggtggcctaactacggctacactagaagaacagtatttggtatctgcgctctgctgaagccagttaccttcggaaaaagagttggtagctcttgatccggcaaacaaaccaccgctggtagcggtggtttttttgtttgcaagcagcagattacgcgcagaaaaaaaggatctcaagaagatcctttgatcttttctacggggtctgacgctcagtggaacgaaaactcacgttaagggattttggtcatgagattatcaaaaaggatcttcacctagatccttttaaattaaaaatgaagttttaaatcaatctaaagtatatatgagtaaacttggtctgacagttaccaatgcttaatcagtgaggcacctatctcagcgatctgtctatttcgttcatccatagttgcctgactccccgtcgtgtagataactacgatacgggagggcttaccatctggccccagtgctgcaatgataccgcgagaaccacgctcaccggctccagatttatcagcaataaaccagccagccggaagggccgagcgcagaagtggtcctgcaactttatccgcctccatccagtctattaattgttgccgggaagctagagtaagtagttcgccagttaatagtttgcgcaacgttgttgccattgctacaggcatcgtggtgtcacgctcgtcgtttggtatggcttcattcagctccggttcccaacgatcaaggcgagttacatgatcccccatgttgtgcaaaaaagcggttagctccttcggtcctccgatcgttgtcagaagtaagttggccgcagtgttatcactcatggttatggcagcactgcataattctcttactgtcatgccatccgtaagatgcttttctgtgactggtgagtactcaaccaagtcattctgagaatagtgtatgcggcgaccgagttgctcttgcccggcgtcaatacgggataataccgcgccacatagcagaactttaaaagtgctcatcattggaaaacgttcttcggggcgaaaactctcaaggatcttaccgctgttgagatccagttcgatgtaacccactcgtgcacccaactgatcttcagcatcttttactttcaccagcgtttctgggtgagcaaaaacaggaaggcaaaatgccgcaaaaaagggaataagggcgacacggaaatgttgaatactcatactcttcctttttcaatattattgaagcatttatcagggttattgtctcatgagcggatacatatttgaatgtatttagaaaaataaacaaataggggttccgcgcacatttccccgaaaagtgccacctgggtcgacattgattattgactagtaatagtaatcaattacggggtcattagttcatagcccatatatggagttccgcgttacataacttacggtaaatggcc

SEQ ID NO: 750 - DNA, 14517 bp, synthetic construct
  misc_feature 1..14517: note = Synthetic
  source 1..14517: mol_type = other DNA
cgcctggctgaccgcccaacgacccccgcccattgacgtcaataatgacgtatgttcccatagtaacgccaatagggactttccattgacgtcaatgggtggagtatttacggtaaactgcccacttggcagtacatcaagtgtatcatatgccaagtacgccccctattgacgtcaatgacggtaaatggcccgcctggcattatgcccagtacatgaccttatgggactttcctacttggcagtacatctacgtattagtcatcgctattaccatggtgatgcggttttggcagtacatcaatgggcgtggatagcggtttgactcacggggatttccaagtctccaccccattgacgtcaatgggagtttgttttggcaccaaaatcaacgggactttccaaaatgtcgtaacaactccgccccattgacgcaaatgggcggtaggcgtgtacggtgggaggtctatataagcagagctggtttagtgaaccgtcagatccgctagcgctaccggactcagatcgccaccatgcccaagaagaaacggaaagtgggctccggggtggccacacagcccaagatcagcctgtctctggatgccgccgacaccaccatcatgcacagagttggaatggccggcctgtacatgaccctgaagcggctggaaaagcagtaccccagcagcagacagagaggcggccacatttcttggagcctgaccgccgataccatcgagctgttttggcagggcagcgactttgtggccctgagctggctgatcaaagagagctttcagctggacgacaccggcctgatccacctgacaggcctggacaacgacgccatcaacctgagccagaagatccacatccacgagggaatctgcgccgtgttcctgcggctgaacaagttttaccaggccggcgagatcgtgaacaccgagctgacagtggaagagaagaaggtggaataccagtacaagagcctgacttggtacgcccaccaggcctttgccgagaagctgtgcgaagccgatacacagcagctgcggcacgactacgtgcagatcacaagctggctgtacctcggcggaattgtgcggcatgccagaacacagaacaccaccaagctggaagaaaagcccgagtacgccctggctctgctgtttgtgcctgtcgtgtgccactactgcctgctgcacatccctagcgaggacctgaaagagaaaaagccccacagatacctggtggtcatccccgagatcaaggacttcgaggatgccagccagagaagatggcggctgcagcagctggaaacaaagcagctgcacgtgtccagcctgggagaagccggcctgctgtactacagcctggacgatattcagcccgagggcgactactaccaggcctgccaagtttggctgtacgagaagatgaaccaggccagccggcagagaaccctgatgagcatcgaggaaatcgagatcgacaagaacaccctgatcacctaccagcaggtccagaagtactttcagcccaactatcagaagatcgagtacaagcagatcttcatcaaagtgaaccccattcggtccctgatcgccgacaatctggtcaccggaatccactggtggtccaacttttgggagaaactggtcatcgaggacagcaaagagtacctgttcaaccagatcttccccaaccgcgagggcttcatcagaatggccgagaacagcgaagaggacaagcactacctgatctttatcaaggtgttccagcaggccatgaagggcaacttcgccaagatgtacgccaaggccgaggacggcaaggaccctcctatcaagaaaaaagtggaacggctgcgggccgagctgaactactgttacgatgagctgagcttcaaagagtatctgagcgacttcctcgtcagaggtggcctgaacaaatacctgaaccagaatcaggccgagatcctgctgctgatcaagaagctgccctggcaagagctgagaatctgggccctgctggccattgccagctacaagcccaaagagaagcccatcagcaaggacgacagcctgacactgaacaaccagcagctcgaagagatgaacgacgagagcgaggaagagggctccgggtccggggggtccggggccacaaacttttccctgctgaagcaggctggcgacgtggaggaaaaccccggacctatgcctaagaagaaaagaaaagtgggcagcggagtcaaccccagaggcatgaccatctacctggaacactggaacctgaagcctctggaaatccctcagcggagccggctgtttagcctggaaccagtggctgtgggcacaccttatgccgagagcctgagcagctacctgcacagactggcccaggctcactgtctgaccagccagaaactggtcatgggcgagatcgcccctctgatcctgaaggacgaggacaagagcgagctgctgagcaagaacctgagccatctgctgggcaacagcgacgccaagcctaccatcaacggcatgagagagatgaccggcaagctggtcaccatcctggaagaactgaccatgcggcaggacctgcggtttctgacactgctgtcttggaagggcatgatctacgacaagggcctgttccgcaactacagagcctggtgtccttgctgctgggaagagtggatgcgcgagaacaagacaatctacgagcccctgctgtggtccttcaaggacgtggaattctgcgtgatccacaagcagcggctgatcgaggaatgccctcactgtggcagcagactgcccatcatggccaagtttagccctgccggcttctgcagcagatgctatggatggctgggccaagaagtgaagggcgaagaggaaatcgagaagtaccgcgtgaacatccagggcatctccgagctgattgccctgacacctcagctgggctacgagcctattcctatcgagctgacccggaaactgcagctgatcctgctggtgttcgagcaggccatcggcaaggatctgaacctgctgggcgatctgggcagaatcatggaaagcctgcggatcgccagcaagaccaaccagaaccagccttaccacctggtcaagctgatcatccccgtgtgcgagaaggccaagatcagcgtgtcccagctgttcggcctggactttcaagagctgggcaagatcctgttcggcaatttctccctggaactgaaactggggagcggctctggaggctctggagccacaaatttctctctgctgaaacaggctggggatgtggaggaaaatcctggacccatgcccaagaagaagaggaaggtgggatccggcatgagccagaagaagaacgacaacaacatccccaactactacctgtacggcaccgtgctgaccagatacggactggccagcctgaaccacgacatgcggagaggcaacaagaccacactgcagaaaggctactggaacggcaagatccacagcttcgtgggcagcagcgccattagatgggccctgaggttctatctgcagaaacagggctacctggtcaacagagtgtgggacgaagatgagcacatcaaccggctgaccaacgaggacttcgaccccgagcagttctacgacgacgacatcttcggcttcgccctgctggaaagcgccgagatcgaggaagagacaagcaccaccaagcggaagaagaagcagaccaagaccagcacaccccaccagagaatgggagccctggccatgaatatggccgtgtctctgaccccttacgatggcgccgtgaagctgggagccaagtctggcagagagaaggacagcaccagcctgcacttcaccgagtaccacgccaccagataccagtactacttcggcatcaacgccacacacctgaaggacttcagccggatcctgcctgtgatcgacggcatcatgaacctgcctaaagtcggcggcaacagcaatatcttcaactaccctttctgccccgacagcctggtgctgcagtggaccaacaatttcgccagctacatcagctactgcttcgagtactgcgaccctcagagcaaagaggccaagttcacccaagagttcatcgacgaggtggaatgcggccagatcgagccttctcagctctggatcggcggcaccatcgtgaaggatctgcagcagctggacaacttcgacgacagccccttcaagaaggcccacatctaccggaaccggaacgagctgatcgagaacctgaaaaccgtgatcacccggaacctgggcctcgaggaatccaagggctctggaagcggcggaagcggcgctaccaactttagcctgctgaagcaggccggcgacgtggaggaaaacccagggcccatgcccaaaaagaagcggaaagtgggctccgggacagcccctctgatcctgtacctggatgtgcccttcgccaccttcagagagtctcacgccagagagatgggcaagacataccccgttcctccaccagccacagtgtacggcatgctgctgtctctcgtgggcgagacagacgtgtacagacactgcggagtggaactggccattgccatgctgagcatccccaagaagtcccggatcctgcggcagatgcggagattcaagaacgccgacttctctcaccccgagaacgtgatcccttgctaccaagagatcctgagcaacctgaagtgcctgatctgggtccgaagcgagggcgagaagatccagcctagcctgagagagagaatccagctggccctggatcaccctgaactcgtcagaagattcggctgcctgttcctgggcgagagcgaccagctgatcaagagcatcaagctggtgtcccaggactacctgcagggcgtcagacagtgggtcatcagagacaacagaggctggctgaccctgccttactgggttgaccacgtgggcagcagaaatacccggttcctgagataccggatcgaggaaatccctagcagccctcctcctgacctggcctggacaatgattcagagccccatcggaagcgggtccggagggtccggagccactaatttctccctgctgaaacaggcaggcgatgtggaagagaatcccgggcctatgcccaaaaagaaaaggaaggtgggatccggcgccgctctgctgatccagagcgaggaatacgtggacctgaccttcaagctgagaggcgcccctattcctctggacaacggctacgtgatctacagcgccctgagcagaatctgccccatcctgcacgagctggacaacatcggcattcaccctatcgccggcattcccaccagaaacaacctgctggaactgacagcccagagccggctgaaagtgcggattcaccaccagcagatccctctgatctacccctatctggccggacagaccttccacatcggccagaatagctaccagctggacatccccgactacaagcccctgatcagcagcgagagcgtgtacagcagactggtcatcatcaccggcttccaagagcctaccaacttcatcgaggccgtgcagcggaagctggataacaagggcatccagggcaagatcgagctgctgaccagacaggatggcacccctcagaagagacagctgaccatcaacaagcagggcaagcagttcaaagtgcgcggctttggcgtgcggatcagcgagctgaatcctgaggatagcctgacactgcaagagcagggcatctccggcaagcggaagatgatgtgcggcatcttcgtgcccgccaccagatccaaagaggaagaggaaaccggatccggaagcgggggaagcggggccactaacttttctctgctgaagcaggcaggggacgtggaagagaaccctggccccatgtacccctacgacgtgccagactacgcccctaagaagaagagaaaagtcggcggctctggcggcggaggatctggcggaggtggaagcggaggaaaggaacagttcgagcagtgggtcgcccggctgcagatttctgaagccggccagaaaatcatcgagaaagtgcggagcagcgagcccagcagaagagttggcggcggaagcaaaaatgtggccggcagataccccagccggaagatgggagtgaccatccagttcgagagccacagagtggaactgcccgtgatctaccagctggaacacgacgaggacgtgctggaattctacgaccagcctcctcagatcaagctggactaccaggccagcaatggcagacgactgggagtgctgcacacccctgatctgttcgtgatcaggaccaatagcgccggctgggaagagtgcaagaccgagcaggatctgaagaagctggcccagaagaaccccaaccggtacttctacagccaagaggacaaccagtggcactgccctccaggcgaagtgtacgccgatcagttcggcctgtactaccggatcagaagcgacaaagaaatcaactgggtgctgcagcggaacctgcagttcctggaagattactaccgcagcgagagcctgggcgtcgaacaggctattgctcagtctctgctggccatcgtgtctagccagcctggaattacactggccgagctgctgcatcagcagacaggcgccaagagcgacgacatctacaccctgatcgtgcaagagcagatctacttcgacctgaacgccgctcctctggctgagcctgagagatgcctgatcttcagggatgagcagaccgccagcgcctacagactgatggtggaacagcccaacgtgtccctgcctgccatctctcccgtgatcaatatcgccaccggcacacccgtgtcctgggatggaaagggcctgaacatcatcctcgtgggcgagacagaagtgatcctgggcgccgagaatgaccagctgatcaagttcaagaaaaacgtgttcgaggaactcgtgcggcagggcgagatcacatctctgcagaccccagagaaaaccgacatcagcaccgagagctggcagcggttttaccaggcctctccagaggatcaggccgaggctctggaacggtacaagaccatcgagccctacctgaacggacaccctcctgagaacgagacaatccccgccagaaccatcagagactggaaggccaagtacctgacagccctgcagaagtacggctgcggctatatcggcctgctgtcccacagaagcgtgaagggcaacagacagagaaagctgcccgaggacaccctggccatcatggaaagattcattctcgaggactacgagacactgaagcagaaacggatgctggaagtgtatggcgccctggtgctggcttgtgaacagagcagtgtgatcgcccctagctacaaggccttcaccaaagaagtgaagcggcggaccggctacgagcagaccaagaagagacaaggcagaagggccgcctaccagtacgagagcttttactgggagctgacccagaaaacaccccggcacggcgatagacctttcgagatcggacacatcgatcacacccagctggacgtggaacttgtgtgctccagaaccggcagaaacctgggcagaccttgggccacctttctggtggatgcctactctagaaggctgctggccgtgtacctgaccttcgacagcccaagctaccggtcctgtctgatggtgctgcggatctgcgtgaagaggcatggcagactgcctcagatcgtggtggtggacaatggcaccgagttccacagcgtgtacttcgaaaccctgctggctaccttcgagtgcaccaagaagcagcggcctccagccaaggccagatttggcagcgtgtgcgagagactgttcggcaccagcaacacccagttcgtgcacaacctgctgggcaatacccagatcacccggaacgtgcggcaagtgaccaagagcgtgaaccccaagaatcaggccgtgtggacactgggactgctgtacgagtatctgtgcgcctgggcctacgaggtgtacgacacagatgaacaccccgctctgtttcagagccccagggatgcttttgccgccggaatggtcacaagcggcagcagactgcaccggatgatcccttacgacgagaacttccagatcctgacactgcccaccaccagcgagggcaaagccaaggtgcaagttggcagaggcgtgaagatcaacagcatctactactggtccaacagcttcagggacccacagatcgagaacaccagcgtgcccaccagatacgaccccttcaacatcggaatcgcctacgccttcgtcagaggccagtgggtgcagtgcatcagccagtactacagccagctgcagggcagatccgagaaagagctgaagctggctagcgccgagctgagaaagagaagcagcaactacggcagacagagccaggtgtccgccaagaacctggccgaatttctggccagcgtcgaggcccaagagacactgctggaacagagaagctacgacgccgaggccagagaagtgttcatcgtgatcgaaggcggcaaggccgccaccagcagaaatgagcagcctaagctgatccaggtgccgtttgagaacaccgacacacaggtggccgaggacgaggccattacacctgaaacactggtggtgtacgaggaattcagcctgtgactagcaacgttactggccgaagccgcttggaataaggccggtgtgcgtttgtctatatgttattttccaccatattgccgtcttttggcaatgtgagggcccggaaacctggccctgtcttcttgacgagcattcctaggggtctttcccctctcgccaaaggaatgcaaggtctgttgaatgtcgtgaaggaagcagttcctctggaagcttcttgaagacaaacaacgtctgtagcgaccctttgcaggcagcggaaccccccacctggcgacaggtgcctctgcggccaaaagccacgtgtataagatacacctgcaaaggcggcacaaccccagtgccacgttgtgagttggatagttgtggaaagagtcaaatggctctcctcaagcgtattcaacaaggggctgaaggatgcccagaaggtaccccattgtatgggatctgatctggggcctcggtgcacatgctttacatgtgtttagtcgaggttaaaaaaacgtctaggccccccgaaccacggggacgtggttttcctttgaaaaacacgatgataatatggccacaaccatggtgagcaagggcgaggagctgttcaccggggtggtgcccatcctggtcgagctggacggcgacgtaaacggccacaagttcagcgtgtccggcgagggcgagggcgatgccacctacggcaagctgaccctgaagttcatctgcaccaccggcaagctgcccgtgccctggcccaccctcgtgaccaccctgacctacggcgtgcagtgcttcagccgctaccccgaccacatgaagcagcacgacttcttcaagtccgccatgcccgaaggctacgtccaggagcgcaccatcttcttcaaggacgacggcaactacaagacccgcgccgaggtgaagttcgagggcgacaccctggtgaaccgcatcgagctgaagggcatcgacttcaaggaggacggcaacatcctggggcacaagctggagtacaactacaacagccacaacgtctatatcatggccgacaagcagaagaacggcatcaaggtgaacttcaagatccgccacaacatcgaggacggcagcgtgcagctcgccgaccactaccagcagaacacccccatcggcgacggccccgtgctgctgcccgacaaccactacctgagcacccagtccgccctgagcaaagaccccaacgagaagcgcgatcacatggtcctgctggagttcgtgaccgccgccgggatcactctcggcatggacgagctgtacaagggcagcggcagcggcgcaaccaatttcagcctgctgaaacaggccggcgatgtggaagagaatccaggccccatgtacccctacgacgtgccagactacgcccctaagaagaagagaaaagtcggcggctctggcggcggaggatctggcggaggtggaagcggaggaacccagaccaacggcttccctctggaactgctgaccagacctgctcctgagagactggcctacttcgagaactacaccgtgggacaccccagactgaaagaggtgtccgagatcctgatgcggacaatcgctgaacctgccggcgctagcttcatcttcgtgtatggacctagcggcgtgggcaagaccacactgagactgagagtggaacagaaactgaccgagctggtgctgcccctgctggaatctgatagaggcagagtgcctgtcgtgggcgttgaagctgtggcccctgagagcagaaacttcaactggaaggactactacacacgggccctgatcgccctggaagaacctctgatcgaccacaagttcgactacggcgtgcggggcatcagcagagacaacttcggcaagatcaacgtggaaagcaaggtggtggccccagctctgagaagggccctcgaaaatgccctgatccacagacaccccgacgtgttctttgtggacgaggcccagcactttggcaagatggccagcggctacaagctgcaggatcagctggattgcctgaagtccctggccaacatgaccggcatcctgcactgtctgctgggcacatacgagctgctgaccttcagaaacctgagcggccagctgtctcggagaagcgtggacatccacttcagacggtactgcgccgagaatcccgaagatgtgcaggccttcaagagcgtgctgctgactttccagcagcagatgcctctggccgaggctcctgatctggtgtctcactgggagtacttctacgagagaaccctgggctgcgtgggcatcctgaagaactggctgacaagagccctgaaggacgccctggatagagaagccaccaccgtgacactgaaggacctgcagaaacgcgcttggagcgtggcccagtgccagcggatgttcaaagagatccaagagggcgaaagacagctgagcgagacagagacagacatccagaacctgagatctgccctcggcctgggagccaagcctattgtgctgcctgaggaaacccctaagaccaccagacctccaggcaaagtgggcaaaagaaagcccaagagggaccccatcggagtgcagcaggatgtgtcttgacctcaggtgcaggctgcctatcagaaggtggtggctggtgtggccaatgccctggctcacaaataccactgagatctttttccctctgccaaaaattatggggacatcatgaagccccttgagcatctgacttctggctaataaaggaaatttattttcattgcaatagtgtgttggaattttttgtgtctctcactcggaaggacatatgggagggcaaatcatttaaaacatcagaatgagtatttggtttagagtttggcaacatatgcccatatgctggctgccatgaacaaaggttggctataaagaggtcatcagtatatgaaacagccccctgctgtccattccttattccatagaaaagccttgacttgaggttagattttttttatattttgttttgtgttatttttttctttaacatccctaaaattttccttacatgttttactagccagatttttcctcctctcctgactactcccagtcatagctgtccctcttctcttatggagatccctcgacctgcagcccaagcttggcgtaatcatggtcatagctgtttcctgtgtgaaattgttatccgctcacaattccacacaacatacgagccggaagcataaagtgtaaagcctggggtgcctaatgagtgagctaactcacattaattgcgttgcgctcactgcccgctttccagtcgggaaacctgtcgtgccagcggatccattccacagaattaaaaaattgagcaacgcctaacggcatcaagccacgaatcacaggcgtcgcgctggcgggcattcctgaagctgacagttgagcaacgcctaacggcatcaagccacgaatcacgtcctttccacaagatatataaagccaagaaatcgaaatactttcaagttacggtaagcatatgatagtccattttaaaacataattttaaaactgcaaactacccaagaaattattactttctacgtcacgtattttgtactaatatctttgtgtttacagtcaaattaattctaattatctctctaacagccttgtatcgtatatgcaaatatgaaggaatcatgggaaataggccctccgctgcattaatgaatcggccaacgcgcggggagaggcggtttgcgtattgggcgctgttccgcttcctcgctcactgactcgctgcgctcggtcgttcggctgcggcgagcggtatcagctcactcaaaggcggtaatacggttatccacagaatcaggggataacgcaggaaagaacatgtgagcaaaaggccagcaaaaggccaggaaccgtaaaaaggccgcgttgctggcgtttttccataggctccgcccccctgacgagcatcacaaaaatcgacgctcaagtcagaggtggcgaaacccgacaggactataaagataccaggcgtttccccctggaagctccctcgtgcgctctcctgttccgaccctgccgcttaccggatacctgtccgcctttctcccttcgggaagcgtggcgctttctcatagctcacgctgtaggtatctcagttcggtgtaggtcgttcgctccaagctgggctgtgtgcacgaaccccccgttcagcccgaccgctgcgccttatccggtaactatcgtcttgagtccaacccggtaagacacgacttatcgccactggcagcagccactggtaacaggattagcagagcgaggtatgtaggcggtgctacagagttcttgaagtggtggcctaactacggctacactagaagaacagtatttggtatctgcgctctgctgaagccagttaccttcggaaaaagagttggtagctcttgatccggcaaacaaaccaccgctggtagcggtggtttttttgtttgcaagcagcagattacgcgcagaaaaaaaggatctcaagaagatcctttgatcttttctacggggtctgacgctcagtggaacgaaaactcacgttaagggattttggtcatgagattatcaaaaaggatcttcacctagatccttttaaattaaaaatgaagttttaaatcaatctaaagtatatatgagtaaacttggtctgacagttaccaatgcttaatcagtgaggcacctatctcagcgatctgtctatttcgttcatccatagttgcctgactccccgtcgtgtagataactacgatacgggagggcttaccatctggccccagtgctgcaatgataccgcgagaaccacgctcaccggctccagatttatcagcaataaaccagccagccggaagggccgagcgcagaagtggtcctgcaactttatccgcctccatccagtctattaattgttgccgggaagctagagtaagtagttcgccagttaatagtttgcgcaacgttgttgccattgctacaggcatcgtggtgtcacgctcgtcgtttggtatggcttcattcagctccggttcccaacgatcaaggcgagttacatgatcccccatgttgtgcaaaaaagcggttagctccttcggtcctccgatcgttgtcagaagtaagttggccgcagtgttatcactcatggttatggcagcactgcataattctcttactgtcatgccatccgtaagatgcttttctgtgactggtgagtactcaaccaagtcattctgagaatagtgtatgcggcgaccgagttgctcttgcccggcgtcaatacgggataataccgcgccacatagcagaactttaaaagtgctcatcattggaaaacgttcttcggggcgaaaactctcaaggatcttaccgctgttgagatccagttcgatgtaacccactcgtgcacccaactgatcttcagcatcttttactttcaccagcgtttctgggtgagcaaaaacaggaaggcaaaatgccgcaaaaaagggaataagggcgacacggaaatgttgaatactcatactcttcctttttcaatattattgaagcatttatcagggttattgtctcatgagcggatacatatttgaatgtatttagaaaaataaacaaataggggttccgcgcacatttccccgaaaagtgccacctgggtcgacattgattattgactagtaatagtaatcaattacggggtcattagttcatagcccatatatggagttccgcgttacataacttacggtaaatggcc

SEQ ID NO: 751 - DNA, 14517 bp, synthetic construct
  misc_feature 1..14517: note = Synthetic
  source 1..14517: mol_type = other DNA
cgcctggctgaccgcccaacgacccccgcccattgacgtcaataatgacgtatgttcccatagtaacgccaatagggactttccattgacgtcaatgggtggagtatttacggtaaactgcccacttggcagtacatcaagtgtatcatatgccaagtacgccccctattgacgtcaatgacggtaaatggcccgcctggcattatgcccagtacatgaccttatgggactttcctacttggcagtacatctacgtattagtcatcgctattaccatggtgatgcggttttggcagtacatcaatgggcgtggatagcggtttgactcacggggatttccaagtctccaccccattgacgtcaatgggagtttgttttggcaccaaaatcaacgggactttccaaaatgtcgtaacaactccgccccattgacgcaaatgggcggtaggcgtgtacggtgggaggtctatataagcagagctggtttagtgaaccgtcagatccgctagcgctaccggactcagatcgccaccatgcccaagaagaaacggaaagtgggctccggggtggccacacagcccaagatcagcctgtctctggatgccgccgacaccaccatcatgcacagagttggaatggccggcctgtacatgaccctgaagcggctggaaaagcagtaccccagcagcagacagagaggcggccacatttcttggagcctgaccgccgataccatcgagctgttttggcagggcagcgactttgtggccctgagctggctgatcaaagagagctttcagctggacgacaccggcctgatccacctgacaggcctggacaacgacgccatcaacctgagccagaagatccacatccacgagggaatctgcgccgtgttcctgcggctgaacaagttttaccaggccggcgagatcgtgaacaccgagctgacagtggaagagaagaaggtggaataccagtacaagagcctgacttggtacgcccaccaggcctttgccgagaagctgtgcgaagccgatacacagcagctgcggcacgactacgtgcagatcacaagctggctgtacctcggcggaattgtgcggcatgccagaacacagaacaccaccaagctggaagaaaagcccgagtacgccctggctctgctgtttgtgcctgtcgtgtgccactactgcctgctgcacatccctagcgaggacctgaaagagaaaaagccccacagatacctggtggtcatccccgagatcaaggacttcgaggatgccagccagagaagatggcggctgcagcagctggaaacaaagcagctgcacgtgtccagcctgggagaagccggcctgctgtactacagcctggacgatattcagcccgagggcgactactaccaggcctgccaagtttggctgtacgagaagatgaaccaggccagccggcagagaaccctgatgagcatcgaggaaatcgagatcgacaagaacaccctgatcacctaccagcaggtccagaagtactttcagcccaactatcagaagatcgagtacaagcagatcttcatcaaagtgaaccccattcggtccctgatcgccgacaatctggtcaccggaatccactggtggtccaacttttgggagaaactggtcatcgaggacagcaaagagtacctgttcaaccagatcttccccaaccgcgagggcttcatcagaatggccgagaacagcgaagaggacaagcactacctgatctttatcaaggtgttccagcaggccatgaagggcaacttcgccaagatgtacgccaaggccgaggacggcaaggaccctcctatcaagaaaaaagtggaacggctgcgggccgagctgaactactgttacgatgagctgagcttcaaagagtatctgagcgacttcctcgtcagaggtggcctgaacaaatacctgaaccagaatcaggccgagatcctgctgctgatcaagaagctgccctggcaagagctgagaatctgggccctgctggccattgccagctacaagcccaaagagaagcccatcagcaaggacgacagcctgacactgaacaaccagcagctcgaagagatgaacgacgagagcgaggaagagggctccgggtccggggggtccggggccacaaacttttccctgctgaagcaggctggcgacgtggaggaaaaccccggacctatgcctaagaagaaaagaaaagtgggcagcggagtcaaccccagaggcatgaccatctacctggaacactggaacctgaagcctctggaaatccctcagcggagccggctgtttagcctggaaccagtggctgtgggcacaccttatgccgagagcctgagcagctacctgcacagactggcccaggctcactgtctgaccagccagaaactggtcatgggcgagatcgcccctctgatcctgaaggacgaggacaagagcgagctgctgagcaagaacctgagccatctgctgggcaacagcgacgccaagcctaccatcaacggcatgagagagatgaccggcaagctggtcaccatcctggaagaactgaccatgcggcaggacctgcggtttctgacactgctgtcttggaagggcatgatctacgacaagggcctgttccgcaactacagagcctggtgtccttgctgctgggaagagtggatgcgcgagaacaagacaatctacgagcccctgctgtggtccttcaaggacgtggaattctgcgtgatccacaagcagcggctgatcgaggaatgccctcactgtggcagcagactgcccatcatggccaagtttagccctgccggcttctgcagcagatgctatggatggctgggccaagaagtgaagggcgaagaggaaatcgagaagtaccgcgtgaacatccagggcatctccgagctgattgccctgacacctcagctgggctacgagcctattcctatcgagctgacccggaaactgcagctgatcctgctggtgttcgagcaggccatcggcaaggatctgaacctgctgggcgatctgggcagaatcatggaaagcctgcggatcgccagcaagaccaaccagaaccagccttaccacctggtcaagctgatcatccccgtgtgcgagaaggccaagatcagcgtgtcccagctgttcggcctggactttcaagagctgggcaagatcctgttcggcaatttctccctggaactgaaactggggagcggctctggaggctctggagccacaaatttctctctgctgaaacaggctggggatgtggaggaaaatcctggacccatgcccaagaagaagaggaaggtgggatccggcatgagccagaagaagaacgacaacaacatccccaactactacctgtacggcaccgtgctgaccagatacggactggccagcctgaaccacgacatgcggagaggcaacaagaccacactgcagaaaggctactggaacggcaagatccacagcttcgtgggcagcagcgccattagatgggccctgaggttctatctgcagaaacagggctacctggtcaacagagtgtgggacgaagatgagcacatcaaccggctgaccaacgaggacttcgaccccgagcagttctacgacgacgacatcttcggcttcgccctgctggaaagcgccgagatcgaggaagagacaagcaccaccaagcggaagaagaagcagaccaagaccagcacaccccaccagagaatgggagccctggccatgaatatggccgtgtctctgaccccttacgatggcgccgtgaagctgggagccaagtctggcagagagaaggacagcaccagcctgcacttcaccgagtaccacgccaccagataccagtactacttcggcatcaacgccacacacctgaaggacttcagccggatcctgcctgtgatcgacggcatcatgaacctgcctaaagtcggcggcaacagcaatatcttcaactaccctttctgccccgacagcctggtgctgcagtggaccaacaatttcgccagctacatcagctactgcttcgagtactgcgaccctcagagcaaagaggccaagttcacccaagagttcatcgacgaggtggaatgcggccagatcgagccttctcagctctggatcggcggcaccatcgtgaaggatctgcagcagctggacaacttcgacgacagccccttcaagaaggcccacatctaccggaaccggaacgagctgatcgagaacctgaaaaccgtgatcacccggaacctgggcctcgaggaatccaagggctctggaagcggcggaagcggcgctaccaactttagcctgctgaagcaggccggcgacgtggaggaaaacccagggcccatgcccaaaaagaagcggaaagtgggctccggggccgctctgctgatccagagcgaggaatacgtggacctgaccttcaagctgagaggcgcccctattcctctggacaacggctacgtgatctacagcgccctgagcagaatctgccccatcctgcacgagctggacaacatcggcattcaccctatcgccggcattcccaccagaaacaacctgctggaactgacagcccagagccggctgaaagtgcggattcaccaccagcagatccctctgatctacccctatctggccggacagaccttccacatcggccagaatagctaccagctggacatccccgactacaagcccctgatcagcagcgagagcgtgtacagcagactggtcatcatcaccggcttccaagagcctaccaacttcatcgaggccgtgcagcggaagctggataacaagggcatccagggcaagatcgagctgctgaccagacaggatggcacccctcagaagagacagctgaccatcaacaagcagggcaagcagttcaaagtgcgcggctttggcgtgcggatcagcgagctgaatcctgaggatagcctgacactgcaagagcagggcatctccggcaagcggaagatgatgtgcggcatcttcgtgcccgccaccagatccaaagaggaagaggaaaccggaagcgggtccggagggtccggagccactaatttctccctgctgaaacaggcaggcgatgtggaagagaatcccgggcctatgcccaaaaagaaaaggaaggtgggatccggcacagcccctctgatcctgtacctggatgtgcccttcgccaccttcagagagtctcacgccagagagatgggcaagacataccccgttcctccaccagccacagtgtacggcatgctgctgtctctcgtgggcgagacagacgtgtacagacactgcggagtggaactggccattgccatgctgagcatccccaagaagtcccggatcctgcggcagatgcggagattcaagaacgccgacttctctcaccccgagaacgtgatcccttgctaccaagagatcctgagcaacctgaagtgcctgatctgggtccgaagcgagggcgagaagatccagcctagcctgagagagagaatccagctggccctggatcaccctgaactcgtcagaagattcggctgcctgttcctgggcgagagcgaccagctgatcaagagcatcaagctggtgtcccaggactacctgcagggcgtcagacagtgggtcatcagagacaacagaggctggctgaccctgccttactgggttgaccacgtgggcagcagaaatacccggttcctgagataccggatcgaggaaatccctagcagccctcctcctgacctggcctggacaatgattcagagccccatcggatccggaagcgggggaagcggggccactaacttttctctgctgaagcaggcaggggacgtggaagagaaccctggccccatgtacccctacgacgtgccagactacgcccctaagaagaagagaaaagtcggcggctctggcggcggaggatctggcggaggtggaagcggaggaaaggaacagttcgagcagtgggtcgcccggctgcagatttctgaagccggccagaaaatcatcgagaaagtgcggagcagcgagcccagcagaagagttggcggcggaagcaaaaatgtggccggcagataccccagccggaagatgggagtgaccatccagttcgagagccacagagtggaactgcccgtgatctaccagctggaacacgacgaggacgtgctggaattctacgaccagcctcctcagatcaagctggactaccaggccagcaatggcagacgactgggagtgctgcacacccctgatctgttcgtgatcaggaccaatagcgccggctgggaagagtgcaagaccgagcaggatctgaagaagctggcccagaagaaccccaaccggtacttctacagccaagaggacaaccagtggcactgccctccaggcgaagtgtacgccgatcagttcggcctgtactaccggatcagaagcgacaaagaaatcaactgggtgctgcagcggaacctgcagttcctggaagattactaccgcagcgagagcctgggcgtcgaacaggctattgctcagtctctgctggccatcgtgtctagccagcctggaattacactggccgagctgctgcatcagcagacaggcgccaagagcgacgacatctacaccctgatcgtgcaagagcagatctacttcgacctgaacgccgctcctctggctgagcctgagagatgcctgatcttcagggatgagcagaccgccagcgcctacagactgatggtggaacagcccaacgtgtccctgcctgccatctctcccgtgatcaatatcgccaccggcacacccgtgtcctgggatggaaagggcctgaacatcatcctcgtgggcgagacagaagtgatcctgggcgccgagaatgaccagctgatcaagttcaagaaaaacgtgttcgaggaactcgtgcggcagggcgagatcacatctctgcagaccccagagaaaaccgacatcagcaccgagagctggcagcggttttaccaggcctctccagaggatcaggccgaggctctggaacggtacaagaccatcgagccctacctgaacggacaccctcctgagaacgagacaatccccgccagaaccatcagagactggaaggccaagtacctgacagccctgcagaagtacggctgcggctatatcggcctgctgtcccacagaagcgtgaagggcaacagacagagaaagctgcccgaggacaccctggccatcatggaaagattcattctcgaggactacgagacactgaagcagaaacggatgctggaagtgtatggcgccctggtgctggcttgtgaacagagcagtgtgatcgcccctagctacaaggccttcaccaaagaagtgaagcggcggaccggctacgagcagaccaagaagagacaaggcagaagggccgcctaccagtacgagagcttttactgggagctgacccagaaaacaccccggcacggcgatagacctttcgagatcggacacatcgatcacacccagctggacgtggaacttgtgtgctccagaaccggcagaaacctgggcagaccttgggccacctttctggtggatgcctactctagaaggctgctggccgtgtacctgaccttcgacagcccaagctaccggtcctgtctgatggtgctgcggatctgcgtgaagaggcatggcagactgcctcagatcgtggtggtggacaatggcaccgagttccacagcgtgtacttcgaaaccctgctggctaccttcgagtgcaccaagaagcagcggcctccagccaaggccagatttggcagcgtgtgcgagagactgttcggcaccagcaacacccagttcgtgcacaacctgctgggcaatacccagatcacccggaacgtgcggcaagtgaccaagagcgtgaaccccaagaatcaggccgtgtggacactgggactgctgtacgagtatctgtgcgcctgggcctacgaggtgtacgacacagatgaacaccccgctctgtttcagagccccagggatgcttttgccgccggaatggtcacaagcggcagcagactgcaccggatgatcccttacgacgagaacttccagatcctgacactgcccaccaccagcgagggcaaagccaaggtgcaagttggcagaggcgtgaagatcaacagcatctactactggtccaacagcttcagggacccacagatcgagaacaccagcgtgcccaccagatacgaccccttcaacatcggaatcgcctacgccttcgtcagaggccagtgggtgcagtgcatcagccagtactacagccagctgcagggcagatccgagaaagagctgaagctggctagcgccgagctgagaaagagaagcagcaactacggcagacagagccaggtgtccgccaagaacctggccgaatttctggccagcgtcgaggcccaagagacactgctggaacagagaagctacgacgccgaggccagagaagtgttcatcgtgatcgaaggcggcaaggccgccaccagcagaaatgagcagcctaagctgatccaggtgccgtttgagaacaccgacacacaggtggccgaggacgaggccattacacctgaaacactggtggtgtacgaggaattcagcctgtgactagcaacgttactggccgaagccgcttggaataaggccggtgtgcgtttgtctatatgttattttccaccatattgccgtcttttggcaatgtgagggcccggaaacctggccctgtcttcttgacgagcattcctaggggtctttcccctctcgccaaaggaatgcaaggtctgttgaatgtcgtgaaggaagcagttcctctggaagcttcttgaagacaaacaacgtctgtagcgaccctttgcaggcagcggaaccccccacctggcgacaggtgcctctgcggccaaaagccacgtgtataagatacacctgcaaaggcggcacaaccccagtgccacgttgtgagttggatagttgtggaaagagtcaaatggctctcctcaagcgtattcaacaaggggctgaaggatgcccagaaggtaccccattgtatgggatctgatctggggcctcggtgcacatgctttacatgtgtttagtcgaggttaaaaaaacgtctaggccccccgaaccacggggacgtggttttcctttgaaaaacacgatgataatatggccacaaccatggtgagcaagggcgaggagctgttcaccggggtggtgcccatcctggtcgagctggacggcgacgtaaacggccacaagttcagcgtgtccggcgagggcgagggcgatgccacctacggcaagctgaccctgaagttcatctgcaccaccggcaagctgcccgtgccctggcccaccctcgtgaccaccctgacctacggcgtgcagtgcttcagccgctaccccgaccacatgaagcagcacgacttcttcaagtccgccatgcccgaaggctacgtccaggagcgcaccatcttcttcaaggacgacggcaactacaagacccgcgccgaggtgaagttcgagggcgacaccctggtgaaccgcatcgagctgaagggcatcgacttcaaggaggacggcaacatcctggggcacaagctggagtacaactacaacagccacaacgtctatatcatggccgacaagcagaagaacggcatcaaggtgaacttcaagatccgccacaacatcgaggacggcagcgtgcagctcgccgaccactaccagcagaacacccccatcggcgacggccccgtgctgctgcccgacaaccactacctgagcacccagtccgccctgagcaaagaccccaacgagaagcgcgatcacatggtcctgctggagttcgtgaccgccgccgggatcactctcggcatggacgagctgtacaagggcagcggcagcggcgcaaccaatttcagcctgctgaaacaggccggcgatgtggaagagaatccaggccccatgtacccctacgacgtgccagactacgcccctaagaagaagagaaaagtcggcggctctggcggcggaggatctggcggaggtggaagcggaggaacccagaccaacggcttccctctggaactgctgaccagacctgctcctgagagactggcctacttcgagaactacaccgtgggacaccccagactgaaagaggtgtccgagatcctgatgcggacaatcgctgaacctgccggcgctagcttcatcttcgtgtatggacctagcggcgtgggcaagaccacactgagactgagagtggaacagaaactgaccgagctggtgctgcccctgctggaatctgatagaggcagagtgcctgtcgtgggcgttgaagctgtggcccctgagagcagaaacttcaactggaaggactactacacacgggccctgatcgccctggaagaacctctgatcgaccacaagttcgactacggcgtgcggggcatcagcagagacaacttcggcaagatcaacgtggaaagcaaggtggtggccccagctctgagaagggccctcgaaaatgccctgatccacagacaccccgacgtgttctttgtggacgaggcccagcactttggcaagatggccagcggctacaagctgcaggatcagctggattgcctgaagtccctggccaacatgaccggcatcctgcactgtctgctgggcacatacgagctgctgaccttcagaaacctgagcggccagctgtctcggagaagcgtggacatccacttcagacggtactgcgccgagaatcccgaagatgtgcaggccttcaagagcgtgctgctgactttccagcagcagatgcctctggccgaggctcctgatctggtgtctcactgggagtacttctacgagagaaccctgggctgcgtgggcatcctgaagaactggctgacaagagccctgaaggacgccctggatagagaagccaccaccgtgacactgaaggacctgcagaaacgcgcttggagcgtggcccagtgccagcggatgttcaaagagatccaagagggcgaaagacagctgagcgagacagagacagacatccagaacctgagatctgccctcggcctgggagccaagcctattgtgctgcctgaggaaacccctaagaccaccagacctccaggcaaagtgggcaaaagaaagcccaagagggaccccatcggagtgcagcaggatgtgtcttgacctcaggtgcaggctgcctatcagaaggtggtggctggtgtggccaatgccctggctcacaaataccactgagatctttttccctctgccaaaaattatggggacatcatgaagccccttgagcatctgacttctggctaataaaggaaatttattttcattgcaatagtgtgttggaattttttgtgtctctcactcggaaggacatatgggagggcaaatcatttaaaacatcagaatgagtatttggtttagagtttggcaacatatgcccatatgctggctgccatgaacaaaggttggctataaagaggtcatcagtatatgaaacagccccctgctgtccattccttattccatagaaaagccttgacttgaggttagattttttttatattttgttttgtgttatttttttctttaacatccctaaaattttccttacatgttttactagccagatttttcctcctctcctgactactcccagtcatagctgtccctcttctcttatggagatccctcgacctgcagcccaagcttggcgtaatcatggtcatagctgtttcctgtgtgaaattgttatccgctcacaattccacacaacatacgagccggaagcataaagtgtaaagcctggggtgcctaatgagtgagctaactcacattaattgcgttgcgctcactgcccgctttccagtcgggaaacctgtcgtgccagcggatccattccacagaattaaaaaattgagcaacgcctaacggcatcaagccacgaatcacaggcgtcgcgctggcgggcattcctgaagctgacagttgagcaacgcctaacggcatcaagccacgaatcacgtcctttccacaagatatataaagccaagaaatcgaaatactttcaagttacggtaagcatatgatagtccattttaaaacataattttaaaactgcaaactacccaagaaattattactttctacgtcacgtattttgtactaatatctttgtgtttacagtcaaattaattctaattatctctctaacagccttgtatcgtatatgcaaatatgaaggaatcatgggaaataggccctccgctgcattaatgaatcggccaacgcgcggggagaggcggtttgcgtattgggcgctgttccgcttcctcgctcactgactcgctgcgctcggtcgttcggctgcggcgagcggtatcagctcactcaaaggcggtaatacggttatccacagaatcaggggataacgcaggaaagaacatgtgagcaaaaggccagcaaaaggccaggaaccgtaaaaaggccgcgttgctggcgtttttccataggctccgcccccctgacgagcatcacaaaaatcgacgctcaagtcagaggtggcgaaacccgacaggactataaagataccaggcgtttccccctggaagctccctcgtgcgctctcctgttccgaccctgccgcttaccggatacctgtccgcctttctcccttcgggaagcgtggcgctttctcatagctcacgctgtaggtatctcagttcggtgtaggtcgttcgctccaagctgggctgtgtgcacgaaccccccgttcagcccgaccgctgcgccttatccggtaactatcgtcttgagtccaacccggtaagacacgacttatcgccactggcagcagccactggtaacaggattagcagagcgaggtatgtaggcggtgctacagagttcttgaagtggtggcctaactacggctacactagaagaacagtatttggtatctgcgctctgctgaagccagttaccttcggaaaaagagttggtagctcttgatccggcaaacaaaccaccgctggtagcggtggtttttttgtttgcaagcagcagattacgcgcagaaaaaaaggatctcaagaagatcctttgatcttttctacggggtctgacgctcagtggaacgaaaactcacgttaagggattttggtcatgagattatcaaaaaggatcttcacctagatccttttaaattaaaaatgaagttttaaatcaatctaaagtatatatgagtaaacttggtctgacagttaccaatgcttaatcagtgaggcacctatctcagcgatctgtctatttcgttcatccatagttgcctgactccccgtcgtgtagataactacgatacgggagggcttaccatctggccccagtgctgcaatgataccgcgagaaccacgctcaccggctccagatttatcagcaataaaccagccagccggaagggccgagcgcagaagtggtcctgcaactttatccgcctccatccagtctattaattgttgccgggaagctagagtaagtagttcgccagttaatagtttgcgcaacgttgttgccattgctacaggcatcgtggtgtcacgctcgtcgtttggtatggcttcattcagctccggttcccaacgatcaaggcgagttacatgatcccccatgttgtgcaaaaaagcggttagctccttcggtcctccgatcgttgtcagaagtaagttggccgcagtgttatcactcatggttatggcagcactgcataattctcttactgtcatgccatccgtaagatgcttttctgtgactggtgagtactcaaccaagtcattctgagaatagtgtatgcggcgaccgagttgctcttgcccggcgtcaatacgggataataccgcgccacatagcagaactttaaaagtgctcatcattggaaaacgttcttcggggcgaaaactctcaaggatcttaccgctgttgagatccagttcgatgtaacccactcgtgcacccaactgatcttcagcatcttttactttcaccagcgtttctgggtgagcaaaaacaggaaggcaaaatgccgcaaaaaagggaataagggcgacacggaaatgttgaatactcatactcttcctttttcaatattattgaagcatttatcagggttattgtctcatgagcggatacatatttgaatgtatttagaaaaataaacaaataggggttccgcgcacatttccccgaaaagtgccacctgggtcgacattgattattgactagtaatagtaatcaattacggggtcattagttcatagcccatatatggagttccgcgttacataacttacggtaaatggcc

SEQ ID NO: 752 - DNA, 14517 bp, synthetic construct
  misc_feature 1..14517: note = Synthetic
  source 1..14517: mol_type = other DNA
cgcctggctgaccgcccaacgacccccgcccattgacgtcaataatgacgtatgttcccatagtaacgccaatagggactttccattgacgtcaatgggtggagtatttacggtaaactgcccacttggcagtacatcaagtgtatcatatgccaagtacgccccctattgacgtcaatgacggtaaatggcccgcctggcattatgcccagtacatgaccttatgggactttcctacttggcagtacatctacgtattagtcatcgctattaccatggtgatgcggttttggcagtacatcaatgggcgtggatagcggtttgactcacggggatttccaagtctccaccccattgacgtcaatgggagtttgttttggcaccaaaatcaacgggactttccaaaatgtcgtaacaactccgccccattgacgcaaatgggcggtaggcgtgtacggtgggaggtctatataagcagagctggtttagtgaaccgtcagatccgctagcgctaccggactcagatcgccaccatgcccaagaagaaacggaaagtgggctccggggtcaaccccagaggcatgaccatctacctggaacactggaacctgaagcctctggaaatccctcagcggagccggctgtttagcctggaaccagtggctgtgggcacaccttatgccgagagcctgagcagctacctgcacagactggcccaggctcactgtctgaccagccagaaactggtcatgggcgagatcgcccctctgatcctgaaggacgaggacaagagcgagctgctgagcaagaacctgagccatctgctgggcaacagcgacgccaagcctaccatcaacggcatgagagagatgaccggcaagctggtcaccatcctggaagaactgaccatgcggcaggacctgcggtttctgacactgctgtcttggaagggcatgatctacgacaagggcctgttccgcaactacagagcctggtgtccttgctgctgggaagagtggatgcgcgagaacaagacaatctacgagcccctgctgtggtccttcaaggacgtggaattctgcgtgatccacaagcagcggctgatcgaggaatgccctcactgtggcagcagactgcccatcatggccaagtttagccctgccggcttctgcagcagatgctatggatggctgggccaagaagtgaagggcgaagaggaaatcgagaagtaccgcgtgaacatccagggcatctccgagctgattgccctgacacctcagctgggctacgagcctattcctatcgagctgacccggaaactgcagctgatcctgctggtgttcgagcaggccatcggcaaggatctgaacctgctgggcgatctgggcagaatcatggaaagcctgcggatcgccagcaagaccaaccagaaccagccttaccacctggtcaagctgatcatccccgtgtgcgagaaggccaagatcagcgtgtcccagctgttcggcctggactttcaagagctgggcaagatcctgttcggcaatttctccctggaactgaaactgggctccgggtccggggggtccggggccacaaacttttccctgctgaagcaggctggcgacgtggaggaaaaccccggacctatgcctaagaagaaaagaaaagtgggcagcggagtggccacacagcccaagatcagcctgtctctggatgccgccgacaccaccatcatgcacagagttggaatggccggcctgtacatgaccctgaagcggctggaaaagcagtaccccagcagcagacagagaggcggccacatttcttggagcctgaccgccgataccatcgagctgttttggcagggcagcgactttgtggccctgagctggctgatcaaagagagctttcagctggacgacaccggcctgatccacctgacaggcctggacaacgacgccatcaacctgagccagaagatccacatccacgagggaatctgcgccgtgttcctgcggctgaacaagttttaccaggccggcgagatcgtgaacaccgagctgacagtggaagagaagaaggtggaataccagtacaagagcctgacttggtacgcccaccaggcctttgccgagaagctgtgcgaagccgatacacagcagctgcggcacgactacgtgcagatcacaagctggctgtacctcggcggaattgtgcggcatgccagaacacagaacaccaccaagctggaagaaaagcccgagtacgccctggctctgctgtttgtgcctgtcgtgtgccactactgcctgctgcacatccctagcgaggacctgaaagagaaaaagccccacagatacctggtggtcatccccgagatcaaggacttcgaggatgccagccagagaagatggcggctgcagcagctggaaacaaagcagctgcacgtgtccagcctgggagaagccggcctgctgtactacagcctggacgatattcagcccgagggcgactactaccaggcctgccaagtttggctgtacgagaagatgaaccaggccagccggcagagaaccctgatgagcatcgaggaaatcgagatcgacaagaacaccctgatcacctaccagcaggtccagaagtactttcagcccaactatcagaagatcgagtacaagcagatcttcatcaaagtgaaccccattcggtccctgatcgccgacaatctggtcaccggaatccactggtggtccaacttttgggagaaactggtcatcgaggacagcaaagagtacctgttcaaccagatcttccccaaccgcgagggcttcatcagaatggccgagaacagcgaagaggacaagcactacctgatctttatcaaggtgttccagcaggccatgaagggcaacttcgccaagatgtacgccaaggccgaggacggcaaggaccctcctatcaagaaaaaagtggaacggctgcgggccgagctgaactactgttacgatgagctgagcttcaaagagtatctgagcgacttcctcgtcagaggtggcctgaacaaatacctgaaccagaatcaggccgagatcctgctgctgatcaagaagctgccctggcaagagctgagaatctgggccctgctggccattgccagctacaagcccaaagagaagcccatcagcaaggacgacagcctgacactgaacaaccagcagctcgaagagatgaacgacgagagcgaggaagaggggagcggctctggaggctctggagccacaaatttctctctgctgaaacaggctggggatgtggaggaaaatcctggacccatgcccaagaagaagaggaaggtgggatccggcacagcccctctgatcctgtacctggatgtgcccttcgccaccttcagagagtctcacgccagagagatgggcaagacataccccgttcctccaccagccacagtgtacggcatgctgctgtctctcgtgggcgagacagacgtgtacagacactgcggagtggaactggccattgccatgctgagcatccccaagaagtcccggatcctgcggcagatgcggagattcaagaacgccgacttctctcaccccgagaacgtgatcccttgctaccaagagatcctgagcaacctgaagtgcctgatctgggtccgaagcgagggcgagaagatccagcctagcctgagagagagaatccagctggccctggatcaccctgaactcgtcagaagattcggctgcctgttcctgggcgagagcgaccagctgatcaagagcatcaagctggtgtcccaggactacctgcagggcgtcagacagtgggtcatcagagacaacagaggctggctgaccctgccttactgggttgaccacgtgggcagcagaaatacccggttcctgagataccggatcgaggaaatccctagcagccctcctcctgacctggcctggacaatgattcagagccccatcggctctggaagcggcggaagcggcgctaccaactttagcctgctgaagcaggccggcgacgtggaggaaaacccagggcccatgcccaaaaagaagcggaaagtgggctccggggccgctctgctgatccagagcgaggaatacgtggacctgaccttcaagctgagaggcgcccctattcctctggacaacggctacgtgatctacagcgccctgagcagaatctgccccatcctgcacgagctggacaacatcggcattcaccctatcgccggcattcccaccagaaacaacctgctggaactgacagcccagagccggctgaaagtgcggattcaccaccagcagatccctctgatctacccctatctggccggacagaccttccacatcggccagaatagctaccagctggacatccccgactacaagcccctgatcagcagcgagagcgtgtacagcagactggtcatcatcaccggcttccaagagcctaccaacttcatcgaggccgtgcagcggaagctggataacaagggcatccagggcaagatcgagctgctgaccagacaggatggcacccctcagaagagacagctgaccatcaacaagcagggcaagcagttcaaagtgcgcggctttggcgtgcggatcagcgagctgaatcctgaggatagcctgacactgcaagagcagggcatctccggcaagcggaagatgatgtgcggcatcttcgtgcccgccaccagatccaaagaggaagaggaaaccggaagcgggtccggagggtccggagccactaatttctccctgctgaaacaggcaggcgatgtggaagagaatcccgggcctatgcccaaaaagaaaaggaaggtgggatccggcatgagccagaagaagaacgacaacaacatccccaactactacctgtacggcaccgtgctgaccagatacggactggccagcctgaaccacgacatgcggagaggcaacaagaccacactgcagaaaggctactggaacggcaagatccacagcttcgtgggcagcagcgccattagatgggccctgaggttctatctgcagaaacagggctacctggtcaacagagtgtgggacgaagatgagcacatcaaccggctgaccaacgaggacttcgaccccgagcagttctacgacgacgacatcttcggcttcgccctgctggaaagcgccgagatcgaggaagagacaagcaccaccaagcggaagaagaagcagaccaagaccagcacaccccaccagagaatgggagccctggccatgaatatggccgtgtctctgaccccttacgatggcgccgtgaagctgggagccaagtctggcagagagaaggacagcaccagcctgcacttcaccgagtaccacgccaccagataccagtactacttcggcatcaacgccacacacctgaaggacttcagccggatcctgcctgtgatcgacggcatcatgaacctgcctaaagtcggcggcaacagcaatatcttcaactaccctttctgccccgacagcctggtgctgcagtggaccaacaatttcgccagctacatcagctactgcttcgagtactgcgaccctcagagcaaagaggccaagttcacccaagagttcatcgacgaggtggaatgcggccagatcgagccttctcagctctggatcggcggcaccatcgtgaaggatctgcagcagctggacaacttcgacgacagccccttcaagaaggcccacatctaccggaaccggaacgagctgatcgagaacctgaaaaccgtgatcacccggaacctgggcctcgaggaatccaagggatccggaagcgggggaagcggggccactaacttttctctgctgaagcaggcaggggacgtggaagagaaccctggccccatgtacccctacgacgtgccagactacgcccctaagaagaagagaaaagtcggcggctctggcggcggaggatctggcggaggtggaagcggaggaaaggaacagttcgagcagtgggtcgcccggctgcagatttctgaagccggccagaaaatcatcgagaaagtgcggagcagcgagcccagcagaagagttggcggcggaagcaaaaatgtggccggcagataccccagccggaagatgggagtgaccatccagttcgagagccacagagtggaactgcccgtgatctaccagctggaacacgacgaggacgtgctggaattctacgaccagcctcctcagatcaagctggactaccaggccagcaatggcagacgactgggagtgctgcacacccctgatctgttcgtgatcaggaccaatagcgccggctgggaagagtgcaagaccgagcaggatctgaagaagctggcccagaagaaccccaaccggtacttctacagccaagaggacaaccagtggcactgccctccaggcgaagtgtacgccgatcagttcggcctgtactaccggatcagaagcgacaaagaaatcaactgggtgctgcagcggaacctgcagttcctggaagattactaccgcagcgagagcctgggcgtcgaacaggctattgctcagtctctgctggccatcgtgtctagccagcctggaattacactggccgagctgctgcatcagcagacaggcgccaagagcgacgacatctacaccctgatcgtgcaagagcagatctacttcgacctgaacgccgctcctctggctgagcctgagagatgcctgatcttcagggatgagcagaccgccagcgcctacagactgatggtggaacagcccaacgtgtccctgcctgccatctctcccgtgatcaatatcgccaccggcacacccgtgtcctgggatggaaagggcctgaacatcatcctcgtgggcgagacagaagtgatcctgggcgccgagaatgaccagctgatcaagttcaagaaaaacgtgttcgaggaactcgtgcggcagggcgagatcacatctctgcagaccccagagaaaaccgacatcagcaccgagagctggcagcggttttaccaggcctctccagaggatcaggccgaggctctggaacggtacaagaccatcgagccctacctgaacggacaccctcctgagaacgagacaatccccgccagaaccatcagagactggaaggccaagtacctgacagccctgcagaagtacggctgcggctatatcggcctgctgtcccacagaagcgtgaagggcaacagacagagaaagctgcccgaggacaccctggccatcatggaaagattcattctcgaggactacgagacactgaagcagaaacggatgctggaagtgtatggcgccctggtgctggcttgtgaacagagcagtgtgatcgcccctagctacaaggccttcaccaaagaagtgaagcggcggaccggctacgagcagaccaagaagagacaaggcagaagggccgcctaccagtacgagagcttttactgggagctgacccagaaaacaccccggcacggcgatagacctttcgagatcggacacatcgatcacacccagctggacgtggaacttgtgtgctccagaaccggcagaaacctgggcagaccttgggccacctttctggtggatgcctactctagaaggctgctggccgtgtacctgaccttcgacagcccaagctaccggtcctgtctgatggtgctgcggatctgcgtgaagaggcatggcagactgcctcagatcgtggtggtggacaatggcaccgagttccacagcgtgtacttcgaaaccctgctggctaccttcgagtgcaccaagaagcagcggcctccagccaaggccagatttggcagcgtgtgcgagagactgttcggcaccagcaacacccagttcgtgcacaacctgctgggcaatacccagatcacccggaacgtgcggcaagtgaccaagagcgtgaaccccaagaatcaggccgtgtggacactgggactgctgtacgagtatctgtgcgcctgggcctacgaggtgtacgacacagatgaacaccccgctctgtttcagagccccagggatgcttttgccgccggaatggtcacaagcggcagcagactgcaccggatgatcccttacgacgagaacttccagatcctgacactgcccaccaccagcgagggcaaagccaaggtgcaagttggcagaggcgtgaagatcaacagcatctactactggtccaacagcttcagggacccacagatcgagaacaccagcgtgcccaccagatacgaccccttcaacatcggaatcgcctacgccttcgtcagaggccagtgggtgcagtgcatcagccagtactacagccagctgcagggcagatccgagaaagagctgaagctggctagcgccgagctgagaaagagaagcagcaactacggcagacagagccaggtgtccgccaagaacctggccgaatttctggccagcgtcgaggcccaagagacactgctggaacagagaagctacgacgccgaggccagagaagtgttcatcgtgatcgaaggcggcaaggccgccaccagcagaaatgagcagcctaagctgatccaggtgccgtttgagaacaccgacacacaggtggccgaggacgaggccattacacctgaaacactggtggtgtacgaggaattcagcctgtgactagcaacgttactggccgaagccgcttggaataaggccggtgtgcgtttgtctatatgttattttccaccatattgccgtcttttggcaatgtgagggcccggaaacctggccctgtcttcttgacgagcattcctaggggtctttcccctctcgccaaaggaatgcaaggtctgttgaatgtcgtgaaggaagcagttcctctggaagcttcttgaagacaaacaacgtctgtagcgaccctttgcaggcagcggaaccccccacctggcgacaggtgcctctgcggccaaaagccacgtgtataagatacacctgcaaaggcggcacaaccccagtgccacgttgtgagttggatagttgtggaaagagtcaaatggctctcctcaagcgtattcaacaaggggctgaaggatgcccagaaggtaccccattgtatgggatctgatctggggcctcggtgcacatgctttacatgtgtttagtcgaggttaaaaaaacgtctaggccccccgaaccacggggacgtggttttcctttgaaaaacacgatgataatatggccacaaccatggtgagcaagggcgaggagctgttcaccggggtggtgcccatcctggtcgagctggacggcgacgtaaacggccacaagttcagcgtgtccggcgagggcgagggcgatgccacctacggcaagctgaccctgaagttcatctgcaccaccggcaagctgcccgtgccctggcccaccctcgtgaccaccctgacctacggcgtgcagtgcttcagccgctaccccgaccacatgaagcagcacgacttcttcaagtccgccatgcccgaaggctacgtccaggagcgcaccatcttcttcaaggacgacggcaactacaagacccgcgccgaggtgaagttcgagggcgacaccctggtgaaccgcatcgagctgaagggcatcgacttcaaggaggacggcaacatcctggggcacaagctggagtacaactacaacagccacaacgtctatatcatggccgacaagcagaagaacggcatcaaggtgaacttcaagatccgccacaacatcgaggacggcagcgtgcagctcgccgaccactaccagcagaacacccccatcggcgacggccccgtgctgctgcccgacaaccactacctgagcacccagtccgccctgagcaaagaccccaacgagaagcgcgatcacatggtcctgctggagttcgtgaccgccgccgggatcactctcggcatggacgagctgtacaagggcagcggcagcggcgcaaccaatttcagcctgctgaaacaggccggcgatgtggaagagaatccaggccccatgtacccctacgacgtgccagactacgcccctaagaagaagagaaaagtcggcggctctggcggcggaggatctggcggaggtggaagcggaggaacccagaccaacggcttccctctggaactgctgaccagacctgctcctgagagactggcctacttcgagaactacaccgtgggacaccccagactgaaagaggtgtccgagatcctgatgcggacaatcgctgaacctgccggcgctagcttcatcttcgtgtatggacctagcggcgtgggcaagaccacactgagactgagagtggaacagaaactgaccgagctggtgctgcccctgctggaatctgatagaggcagagtgcctgtcgtgggcgttgaagctgtggcccctgagagcagaaacttcaactggaaggactactacacacgggccctgatcgccctggaagaacctctgatcgaccacaagttcgactacggcgtgcggggcatcagcagagacaacttcggcaagatcaacgtggaaagcaaggtggtggccccagctctgagaagggccctcgaaaatgccctgatccacagacaccccgacgtgttctttgtggacgaggcccagcactttggcaagatggccagcggctacaagctgcaggatcagctggattgcctgaagtccctggccaacatgaccggcatcctgcactgtctgctgggcacatacgagctgctgaccttcagaaacctgagcggccagctgtctcggagaagcgtggacatccacttcagacggtactgcgccgagaatcccgaagatgtgcaggccttcaagagcgtgctgctgactttccagcagcagatgcctctggccgaggctcctgatctggtgtctcactgggagtacttctacgagagaaccctgggctgcgtgggcatcctgaagaactggctgacaagagccctgaaggacgccctggatagagaagccaccaccgtgacactgaaggacctgcagaaacgcgcttggagcgtggcccagtgccagcggatgttcaaagagatccaagagggcgaaagacagctgagcgagacagagacagacatccagaacctgagatctgccctcggcctgggagccaagcctattgtgctgcctgaggaaacccctaagaccaccagacctccaggcaaagtgggcaaaagaaagcccaagagggaccccatcggagtgcagcaggatgtgtcttgacctcaggtgcaggctgcctatcagaaggtggtggctggtgtggccaatgccctggctcacaaataccactgagatctttttccctctgccaaaaattatggggacatcatgaagccccttgagcatctgacttctggctaataaaggaaatttattttcattgcaatagtgtgttggaattttttgtgtctctcactcggaaggacatatgggagggcaaatcatttaaaacatcagaatgagtatttggtttagagtttggcaacatatgcccatatgctggctgccatgaacaaaggttggctataaagaggtcatcagtatatgaaacagccccctgctgtccattccttattccatagaaaagccttgacttgaggttagattttttttatattttgttttgtgttatttttttctttaacatccctaaaattttccttacatgttttactagccagatttttcctcctctcctgactactcccagtcatagctgtccctcttctcttatggagatccctcgacctgcagcccaagcttggcgtaatcatggtcatagctgtttcctgtgtgaaattgttatccgctcacaattccacacaacatacgagccggaagcataaagtgtaaagcctggggtgcctaatgagtgagctaactcacattaattgcgttgcgctcactgcccgctttccagtcgggaaacctgtcgtgccagcggatccattccacagaattaaaaaattgagcaacgcctaacggcatcaagccacgaatcacaggcgtcgcgctggcgggcattcctgaagctgacagttgagcaacgcctaacggcatcaagccacgaatcacgtcctttccacaagatatataaagccaagaaatcgaaatactttcaagttacggtaagcatatgatagtccattttaaaacataattttaaaactgcaaactacccaagaaattattactttctacgtcacgtattttgtactaatatctttgtgtttacagtcaaattaattctaattatctctctaacagccttgtatcgtatatgcaaatatgaaggaatcatgggaaataggccctccgctgcattaatgaatcggccaacgcgcggggagaggcggtttgcgtattgggcgctgttccgcttcctcgctcactgactcgctgcgctcggtcgttcggctgcggcgagcggtatcagctcactcaaaggcggtaatacggttatccacagaatcaggggataacgcaggaaagaacatgtgagcaaaaggccagcaaaaggccaggaaccgtaaaaaggccgcgttgctggcgtttttccataggctccgcccccctgacgagcatcacaaaaatcgacgctcaagtcagaggtggcgaaacccgacaggactataaagataccaggcgtttccccctggaagctccctcgtgcgctctcctgttccgaccctgccgcttaccggatacctgtccgcctttctcccttcgggaagcgtggcgctttctcatagctcacgctgtaggtatctcagttcggtgtaggtcgttcgctccaagctgggctgtgtgcacgaaccccccgttcagcccgaccgctgcgccttatccggtaactatcgtcttgagtccaacccggtaagacacgacttatcgccactggcagcagccactggtaacaggattagcagagcgaggtatgtaggcggtgctacagagttcttgaagtggtggcctaactacggctacactagaagaacagtatttggtatctgcgctctgctgaagccagttaccttcggaaaaagagttggtagctcttgatccggcaaacaaaccaccgctggtagcggtggtttttttgtttgcaagcagcagattacgcgcagaaaaaaaggatctcaagaagatcctttgatcttttctacggggtctgacgctcagtggaacgaaaactcacgttaagggattttggtcatgagattatcaaaaaggatcttcacctagatccttttaaattaaaaatgaagttttaaatcaatctaaagtatatatgagtaaacttggtctgacagttaccaatgcttaatcagtgaggcacctatctcagcgatctgtctatttcgttcatccatagttgcctgactccccgtcgtgtagataactacgatacgggagggcttaccatctggccccagtgctgcaatgataccgcgagaaccacgctcaccggctccagatttatcagcaataaaccagccagccggaagggccgagcgcagaagtggtcctgcaactttatccgcctccatccagtctattaattgttgccgggaagctagagtaagtagttcgccagttaatagtttgcgcaacgttgttgccattgctacaggcatcgtggtgtcacgctcgtcgtttggtatggcttcattcagctccggttcccaacgatcaaggcgagttacatgatcccccatgttgtgcaaaaaagcggttagctccttcggtcctccgatcgttgtcagaagtaagttggccgcagtgttatcactcatggttatggcagcactgcataattctcttactgtcatgccatccgtaagatgcttttctgtgactggtgagtactcaaccaagtcattctgagaatagtgtatgcggcgaccgagttgctcttgcccggcgtcaatacgggataataccgcgccacatagcagaactttaaaagtgctcatcattggaaaacgttcttcggggcgaaaactctcaaggatcttaccgctgttgagatccagttcgatgtaacccactcgtgcacccaactgatcttcagcatcttttactttcaccagcgtttctgggtgagcaaaaacaggaaggcaaaatgccgcaaaaaagggaataagggcgacacggaaatgttgaatactcatactcttcctttttcaatattattgaagcatttatcagggttattgtctcatgagcggatacatatttgaatgtatttagaaaaataaacaaataggggttccgcgcacatttccccgaaaagtgccacctgggtcgacattgattattgactagtaatagtaatcaattacggggtcattagttcatagcccatatatggagttccgcgttacataacttacggtaaatggcc

SEQ ID NO: 753 - DNA, 14517 bp, synthetic construct
  misc_feature 1..14517: note = Synthetic
  source 1..14517: mol_type = other DNA
cgcctggctgaccgcccaacgacccccgcccattgacgtcaataatgacgtatgttcccatagtaacgccaatagggactttccattgacgtcaatgggtggagtatttacggtaaactgcccacttggcagtacatcaagtgtatcatatgccaagtacgccccctattgacgtcaatgacggtaaatggcccgcctggcattatgcccagtacatgaccttatgggactttcctacttggcagtacatctacgtattagtcatcgctattaccatggtgatgcggttttggcagtacatcaatgggcgtggatagcggtttgactcacggggatttccaagtctccaccccattgacgtcaatgggagtttgttttggcaccaaaatcaacgggactttccaaaatgtcgtaacaactccgccccattgacgcaaatgggcggtaggcgtgtacggtgggaggtctatataagcagagctggtttagtgaaccgtcagatccgctagcgctaccggactcagatcgccaccatgcccaagaagaaacggaaagtgggctccggggtcaaccccagaggcatgaccatctacctggaacactggaacctgaagcctctggaaatccctcagcggagccggctgtttagcctggaaccagtggctgtgggcacaccttatgccgagagcctgagcagctacctgcacagactggcccaggctcactgtctgaccagccagaaactggtcatgggcgagatcgcccctctgatcctgaaggacgaggacaagagcgagctgctgagcaagaacctgagccatctgctgggcaacagcgacgccaagcctaccatcaacggcatgagagagatgaccggcaagctggtcaccatcctggaagaactgaccatgcggcaggacctgcggtttctgacactgctgtcttggaagggcatgatctacgacaagggcctgttccgcaactacagagcctggtgtccttgctgctgggaagagtggatgcgcgagaacaagacaatctacgagcccctgctgtggtccttcaaggacgtggaattctgcgtgatccacaagcagcggctgatcgaggaatgccctcactgtggcagcagactgcccatcatggccaagtttagccctgccggcttctgcagcagatgctatggatggctgggccaagaagtgaagggcgaagaggaaatcgagaagtaccgcgtgaacatccagggcatctccgagctgattgccctgacacctcagctgggctacgagcctattcctatcgagctgacccggaaactgcagctgatcctgctggtgttcgagcaggccatcggcaaggatctgaacctgctgggcgatctgggcagaatcatggaaagcctgcggatcgccagcaagaccaaccagaaccagccttaccacctggtcaagctgatcatccccgtgtgcgagaaggccaagatcagcgtgtcccagctgttcggcctggactttcaagagctgggcaagatcctgttcggcaatttctccctggaactgaaactgggctccgggtccggggggtccggggccacaaacttttccctgctgaagcaggctggcgacgtggaggaaaaccccggacctatgcctaagaagaaaagaaaagtgggcagcggagtggccacacagcccaagatcagcctgtctctggatgccgccgacaccaccatcatgcacagagttggaatggccggcctgtacatgaccctgaagcggctggaaaagcagtaccccagcagcagacagagaggcggccacatttcttggagcctgaccgccgataccatcgagctgttttggcagggcagcgactttgtggccctgagctggctgatcaaagagagctttcagctggacgacaccggcctgatccacctgacaggcctggacaacgacgccatcaacctgagccagaagatccacatccacgagggaatctgcgccgtgttcctgcggctgaacaagttttaccaggccggcgagatcgtgaacaccgagctgacagtggaagagaagaaggtggaataccagtacaagagcctgacttggtacgcccaccaggcctttgccgagaagctgtgcgaagccgatacacagcagctgcggcacgactacgtgcagatcacaagctggctgtacctcggcggaattgtgcggcatgccagaacacagaacaccaccaagctggaagaaaagcccgagtacgccctggctctgctgtttgtgcctgtcgtgtgccactactgcctgctgcacatccctagcgaggacctgaaagagaaaaagccccacagatacctggtggtcatccccgagatcaaggacttcgaggatgccagccagagaagatggcggctgcagcagctggaaacaaagcagctgcacgtgtccagcctgggagaagccggcctgctgtactacagcctggacgatattcagcccgagggcgactactaccaggcctgccaagtttggctgtacgagaagatgaaccaggccagccggcagagaaccctgatgagcatcgaggaaatcgagatcgacaagaacaccctgatcacctaccagcaggtccagaagtactttcagcccaactatcagaagatcgagtacaagcagatcttcatcaaagtgaaccccattcggtccctgatcgccgacaatctggtcaccggaatccactggtggtccaacttttgggagaaactggtcatcgaggacagcaaagagtacctgttcaaccagatcttccccaaccgcgagggcttcatcagaatggccgagaacagcgaagaggacaagcactacctgatctttatcaaggtgttccagcaggccatgaagggcaacttcgccaagatgtacgccaaggccgaggacggcaaggaccctcctatcaagaaaaaagtggaacggctgcgggccgagctgaactactgttacgatgagctgagcttcaaagagtatctgagcgacttcctcgtcagaggtggcctgaacaaatacctgaaccagaatcaggccgagatcctgctgctgatcaagaagctgccctggcaagagctgagaatctgggccctgctggccattgccagctacaagcccaaagagaagcccatcagcaaggacgacagcctgacactgaacaaccagcagctcgaagagatgaacgacgagagcgaggaagaggggagcggctctggaggctctggagccacaaatttctctctgctgaaacaggctggggatgtggaggaaaatcctggacccatgcccaagaagaagaggaaggtgggatccggcacagcccctctgatcctgtacctggatgtgcccttcgccaccttcagagagtctcacgccagagagatgggcaagacataccccgttcctccaccagccacagtgtacggcatgctgctgtctctcgtgggcgagacagacgtgtacagacactgcggagtggaactggccattgccatgctgagcatccccaagaagtcccggatcctgcggcagatgcggagattcaagaacgccgacttctctcaccccgagaacgtgatcccttgctaccaagagatcctgagcaacctgaagtgcctgatctgggtccgaagcgagggcgagaagatccagcctagcctgagagagagaatccagctggccctggatcaccctgaactcgtcagaagattcggctgcctgttcctgggcgagagcgaccagctgatcaagagcatcaagctggtgtcccaggactacctgcagggcgtcagacagtgggtcatcagagacaacagaggctggctgaccctgccttactgggttgaccacgtgggcagcagaaatacccggttcctgagataccggatcgaggaaatccctagcagccctcctcctgacctggcctggacaatgattcagagccccatcggctctggaagcggcggaagcggcgctaccaactttagcctgctgaagcaggccggcgacgtggaggaaaacccagggcccatgcccaaaaagaagcggaaagtgggctccgggatgagccagaagaagaacgacaacaacatccccaactactacctgtacggcaccgtgctgaccagatacggactggccagcctgaaccacgacatgcggagaggcaacaagaccacactgcagaaaggctactggaacggcaagatccacagcttcgtgggcagcagcgccattagatgggccctgaggttctatctgcagaaacagggctacctggtcaacagagtgtgggacgaagatgagcacatcaaccggctgaccaacgaggacttcgaccccgagcagttctacgacgacgacatcttcggcttcgccctgctggaaagcgccgagatcgaggaagagacaagcaccaccaagcggaagaagaagcagaccaagaccagcacaccccaccagagaatgggagccctggccatgaatatggccgtgtctctgaccccttacgatggcgccgtgaagctgggagccaagtctggcagagagaaggacagcaccagcctgcacttcaccgagtaccacgccaccagataccagtactacttcggcatcaacgccacacacctgaaggacttcagccggatcctgcctgtgatcgacggcatcatgaacctgcctaaagtcggcggcaacagcaatatcttcaactaccctttctgccccgacagcctggtgctgcagtggaccaacaatttcgccagctacatcagctactgcttcgagtactgcgaccctcagagcaaagaggccaagttcacccaagagttcatcgacgaggtggaatgcggccagatcgagccttctcagctctggatcggcggcaccatcgtgaaggatctgcagcagctggacaacttcgacgacagccccttcaagaaggcccacatctaccggaaccggaacgagctgatcgagaacctgaaaaccgtgatcacccggaacctgggcctcgaggaatccaagggaagcgggtccggagggtccggagccactaatttctccctgctgaaacaggcaggcgatgtggaagagaatcccgggcctatgcccaaaaagaaaaggaaggtgggatccggcgccgctctgctgatccagagcgaggaatacgtggacctgaccttcaagctgagaggcgcccctattcctctggacaacggctacgtgatctacagcgccctgagcagaatctgccccatcctgcacgagctggacaacatcggcattcaccctatcgccggcattcccaccagaaacaacctgctggaactgacagcccagagccggctgaaagtgcggattcaccaccagcagatccctctgatctacccctatctggccggacagaccttccacatcggccagaatagctaccagctggacatccccgactacaagcccctgatcagcagcgagagcgtgtacagcagactggtcatcatcaccggcttccaagagcctaccaacttcatcgaggccgtgcagcggaagctggataacaagggcatccagggcaagatcgagctgctgaccagacaggatggcacccctcagaagagacagctgaccatcaacaagcagggcaagcagttcaaagtgcgcggctttggcgtgcggatcagcgagctgaatcctgaggatagcctgacactgcaagagcagggcatctccggcaagcggaagatgatgtgcggcatcttcgtgcccgccaccagatccaaagaggaagaggaaaccggatccggaagcgggggaagcggggccactaacttttctctgctgaagcaggcaggggacgtggaagagaaccctggccccatgtacccctacgacgtgccagactacgcccctaagaagaagagaaaagtcggcggctctggcggcggaggatctggcggaggtggaagcggaggaaaggaacagttcgagcagtgggtcgcccggctgcagatttctgaagccggccagaaaatcatcgagaaagtgcggagcagcgagcccagcagaagagttggcggcggaagcaaaaatgtggccggcagataccccagccggaagatgggagtgaccatccagttcgagagccacagagtggaactgcccgtgatctaccagctggaacacgacgaggacgtgctggaattctacgaccagcctcctcagatcaagctggactaccaggccagcaatggcagacgactgggagtgctgcacacccctgatctgttcgtgatcaggaccaatagcgccggctgggaagagtgcaagaccgagcaggatctgaagaagctggcccagaagaaccccaaccggtacttctacagccaagaggacaaccagtggcactgccctccaggcgaagtgtacgccgatcagttcggcctgtactaccggatcagaagcgacaaagaaatcaactgggtgctgcagcggaacctgcagttcctggaagattactaccgcagcgagagcctgggcgtcgaacaggctattgctcagtctctgctggccatcgtgtctagccagcctggaattacactggccgagctgctgcatcagcagacaggcgccaagagcgacgacatctacaccctgatcgtgcaagagcagatctacttcgacctgaacgccgctcctctggctgagcctgagagatgcctgatcttcagggatgagcagaccgccagcgcctacagactgatggtggaacagcccaacgtgtccctgcctgccatctctcccgtgatcaatatcgccaccggcacacccgtgtcctgggatggaaagggcctgaacatcatcctcgtgggcgagacagaagtgatcctgggcgccgagaatgaccagctgatcaagttcaagaaaaacgtgttcgaggaactcgtgcggcagggcgagatcacatctctgcagaccccagagaaaaccgacatcagcaccgagagctggcagcggttttaccaggcctctccagaggatcaggccgaggctctggaacggtacaagaccatcgagccctacctgaacggacaccctcctgagaacgagacaatccccgccagaaccatcagagactggaaggccaagtacctgacagccctgcagaagtacggctgcggctatatcggcctgctgtcccacagaagcgtgaagggcaacagacagagaaagctgcccgaggacaccctggccatcatggaaagattcattctcgaggactacgagacactgaagcagaaacggatgctggaagtgtatggcgccctggtgctggcttgtgaacagagcagtgtgatcgcccctagctacaaggccttcaccaaagaagtgaagcggcggaccggctacgagcagaccaagaagagacaaggcagaagggccgcctaccagtacgagagcttttactgggagctgacccagaaaacaccccggcacggcgatagacctttcgagatcggacacatcgatcacacccagctggacgtggaacttgtgtgctccagaaccggcagaaacctgggcagaccttgggccacctttctggtggatgcctactctagaaggctgctggccgtgtacctgaccttcgacagcccaagctaccggtcctgtctgatggtgctgcggatctgcgtgaagaggcatggcagactgcctcagatcgtggtggtggacaatggcaccgagttccacagcgtgtacttcgaaaccctgctggctaccttcgagtgcaccaagaagcagcggcctccagccaaggccagatttggcagcgtgtgcgagagactgttcggcaccagcaacacccagttcgtgcacaacctgctgggcaatacccagatcacccggaacgtgcggcaagtgaccaagagcgtgaaccccaagaatcaggccgtgtggacactgggactgctgtacgagtatctgtgcgcctgggcctacgaggtgtacgacacagatgaacaccccgctctgtttcagagccccagggatgcttttgccgccggaatggtcacaagcggcagcagactgcaccggatgatcccttacgacgagaacttccagatcctgacactgcccaccaccagcgagggcaaagccaaggtgcaagttggcagaggcgtgaagatcaacagcatctactactggtccaacagcttcagggacccacagatcgagaacaccagcgtgcccaccagatacgaccccttcaacatcggaatcgcctacgccttcgtcagaggccagtgggtgcagtgcatcagccagtactacagccagctgcagggcagatccgagaaagagctgaagctggctagcgccgagctgagaaagagaagcagcaactacggcagacagagccaggtgtccgccaagaacctggccgaatttctggccagcgtcgaggcccaagagacactgctggaacagagaagctacgacgccgaggccagagaagtgttcatcgtgatcgaaggcggcaaggccgccaccagcagaaatgagcagcctaagctgatccaggtgccgtttgagaacaccgacacacaggtggccgaggacgaggccattacacctgaaacactggtggtgtacgaggaattcagcctgtgactagcaacgttactggccgaagccgcttggaataaggccggtgtgcgtttgtctatatgttattttccaccatattgccgtcttttggcaatgtgagggcccggaaacctggccctgtcttcttgacgagcattcctaggggtctttcccctctcgccaaaggaatgcaaggtctgttgaatgtcgtgaaggaagcagttcctctggaagcttcttgaagacaaacaacgtctgtagcgaccctttgcaggcagcggaaccccccacctggcgacaggtgcctctgcggccaaaagccacgtgtataagatacacctgcaaaggcggcacaaccccagtgccacgttgtgagttggatagttgtggaaagagtcaaatggctctcctcaagcgtattcaacaaggggctgaaggatgcccagaaggtaccccattgtatgggatctgatctggggcctcggtgcacatgctttacatgtgtttagtcgaggttaaaaaaacgtctaggccccccgaaccacggggacgtggttttcctttgaaaaacacgatgataatatggccacaaccatggtgagcaagggcgaggagctgttcaccggggtggtgcccatcctggtcgagctggacggcgacgtaaacggccacaagttcagcgtgtccggcgagggcgagggcgatgccacctacggcaagctgaccctgaagttcatctgcaccaccggcaagctgcccgtgccctggcccaccctcgtgaccaccctgacctacggcgtgcagtgcttcagccgctaccccgaccacatgaagcagcacgacttcttcaagtccgccatgcccgaaggctacgtccaggagcgcaccatcttcttcaaggacgacggcaactacaagacccgcgccgaggtgaagttcgagggcgacaccctggtgaaccgcatcgagctgaagggcatcgacttcaaggaggacggcaacatcctggggcacaagctggagtacaactacaacagccacaacgtctatatcatggccgacaagcagaagaacggcatcaaggtgaacttcaagatccgccacaacatcgaggacggcagcgtgcagctcgccgaccactaccagcagaacacccccatcggcgacggccccgtgctgctgcccgacaaccactacctgagcacccagtccgccctgagcaaagaccccaacgagaagcgcgatcacatggtcctgctggagttcgtgaccgccgccgggatcactctcggcatggacgagctgtacaagggcagcggcagcggcgcaaccaatttcagcctgctgaaacaggccggcgatgtggaagagaatccaggccccatgtacccctacgacgtgccagactacgcccctaagaagaagagaaaagtcggcggctctggcggcggaggatctggcggaggtggaagcggaggaacccagaccaacggcttccctctggaactgctgaccagacctgctcctgagagactggcctacttcgagaactacaccgtgggacaccccagactgaaagaggtgtccgagatcctgatgcggacaatcgctgaacctgccggcgctagcttcatcttcgtgtatggacctagcggcgtgggcaagaccacactgagactgagagtggaacagaaactgaccgagctggtgctgcccctgctggaatctgatagaggcagagtgcctgtcgtgggcgttgaagctgtggcccctgagagcagaaacttcaactggaaggactactacacacgggccctgatcgccctggaagaacctctgatcgaccacaagttcgactacggcgtgcggggcatcagcagagacaacttcggcaagatcaacgtggaaagcaaggtggtggccccagctctgagaagggccctcgaaaatgccctgatccacagacaccccgacgtgttctttgtggacgaggcccagcactttggcaagatggccagcggctacaagctgcaggatcagctggattgcctgaagtccctggccaacatgaccggcatcctgcactgtctgctgggcacatacgagctgctgaccttcagaaacctgagcggccagctgtctcggagaagcgtggacatccacttcagacggtactgcgccgagaatcccgaagatgtgcaggccttcaagagcgtgctgctgactttccagcagcagatgcctctggccgaggctcctgatctggtgtctcactgggagtacttctacgagagaaccctgggctgcgtgggcatcctgaagaactggctgacaagagccctgaaggacgccctggatagagaagccaccaccgtgacactgaaggacctgcagaaacgcgcttggagcgtggcccagtgccagcggatgttcaaagagatccaagagggcgaaagacagctgagcgagacagagacagacatccagaacctgagatctgccctcggcctgggagccaagcctattgtgctgcctgaggaaacccctaagaccaccagacctccaggcaaagtgggcaaaagaaagcccaagagggaccccatcggagtgcagcaggatgtgtcttgacctcaggtgcaggctgcctatcagaaggtggtggctggtgtggccaatgccctggctcacaaataccactgagatctttttccctctgccaaaaattatggggacatcatgaagccccttgagcatctgacttctggctaataaaggaaatttattttcattgcaatagtgtgttggaattttttgtgtctctcactcggaaggacatatgggagggcaaatcatttaaaacatcagaatgagtatttggtttagagtttggcaacatatgcccatatgctggctgccatgaacaaaggttggctataaagaggtcatcagtatatgaaacagccccctgctgtccattccttattccatagaaaagccttgacttgaggttagattttttttatattttgttttgtgttatttttttctttaacatccctaaaattttccttacatgttttactagccagatttttcctcctctcctgactactcccagtcatagctgtccctcttctcttatggagatccctcgacctgcagcccaagcttggcgtaatcatggtcatagctgtttcctgtgtgaaattgttatccgctcacaattccacacaacatacgagccggaagcataaagtgtaaagcctggggtgcctaatgagtgagctaactcacattaattgcgttgcgctcactgcccgctttccagtcgggaaacctgtcgtgccagcggatccattccacagaattaaaaaattgagcaacgcctaacggcatcaagccacgaatcacaggcgtcgcgctggcgggcattcctgaagctgacagttgagcaacgcctaacggcatcaagccacgaatcacgtcctttccacaagatatataaagccaagaaatcgaaatactttcaagttacggtaagcatatgatagtccattttaaaacataattttaaaactgcaaactacccaagaaattattactttctacgtcacgtattttgtactaatatctttgtgtttacagtcaaattaattctaattatctctctaacagccttgtatcgtatatgcaaatatgaaggaatcatgggaaataggccctccgctgcattaatgaatcggccaacgcgcggggagaggcggtttgcgtattgggcgctgttccgcttcctcgctcactgactcgctgcgctcggtcgttcggctgcggcgagcggtatcagctcactcaaaggcggtaatacggttatccacagaatcaggggataacgcaggaaagaacatgtgagcaaaaggccagcaaaaggccaggaaccgtaaaaaggccgcgttgctggcgtttttccataggctccgcccccctgacgagcatcacaaaaatcgacgctcaagtcagaggtggcgaaacccgacaggactataaagataccaggcgtttccccctggaagctccctcgtgcgctctcctgttccgaccctgccgcttaccggatacctgtccgcctttctcccttcgggaagcgtggcgctttctcatagctcacgctgtaggtatctcagttcggtgtaggtcgttcgctccaagctgggctgtgtgcacgaaccccccgttcagcccgaccgctgcgccttatccggtaactatcgtcttgagtccaacccggtaagacacgacttatcgccactggcagcagccactggtaacaggattagcagagcgaggtatgtaggcggtgctacagagttcttgaagtggtggcctaactacggctacactagaagaacagtatttggtatctgcgctctgctgaagccagttaccttcggaaaaagagttggtagctcttgatccggcaaacaaaccaccgctggtagcggtggtttttttgtttgcaagcagcagattacgcgcagaaaaaaaggatctcaagaagatcctttgatcttttctacggggtctgacgctcagtggaacgaaaactcacgttaagggattttggtcatgagattatcaaaaaggatcttcacctagatccttttaaattaaaaatgaagttttaaatcaatctaaagtatatatgagtaaacttggtctgacagttaccaatgcttaatcagtgaggcacctatctcagcgatctgtctatttcgttcatccatagttgcctgactccccgtcgtgtagataactacgatacgggagggcttaccatctggccccagtgctgcaatgataccgcgagaaccacgctcaccggctccagatttatcagcaataaaccagccagccggaagggccgagcgcagaagtggtcctgcaactttatccgcctccatccagtctattaattgttgccgggaagctagagtaagtagttcgccagttaatagtttgcgcaacgttgttgccattgctacaggcatcgtggtgtcacgctcgtcgtttggtatggcttcattcagctccggttcccaacgatcaaggcgagttacatgatcccccatgttgtgcaaaaaagcggttagctccttcggtcctccgatcgttgtcagaagtaagttggccgcagtgttatcactcatggttatggcagcactgcataattctcttactgtcatgccatccgtaagatgcttttctgtgactggtgagtactcaaccaagtcattctgagaatagtgtatgcggcgaccgagttgctcttgcccggcgtcaatacgggataataccgcgccacatagcagaactttaaaagtgctcatcattggaaaacgttcttcggggcgaaaactctcaaggatcttaccgctgttgagatccagttcgatgtaacccactcgtgcacccaactgatcttcagcatcttttactttcaccagcgtttctgggtgagcaaaaacaggaaggcaaaatgccgcaaaaaagggaataagggcgacacggaaatgttgaatactcatactcttcctttttcaatattattgaagcatttatcagggttattgtctcatgagcggatacatatttgaatgtatttagaaaaataaacaaataggggttccgcgcacatttccccgaaaagtgccacctgggtcgacattgattattgactagtaatagtaatcaattacggggtcattagttcatagcccatatatggagttccgcgttacataacttacggtaaatggcc

SEQ ID NO: 754 - DNA, 14517 bp, synthetic construct
  misc_feature 1..14517: note = Synthetic
  source 1..14517: mol_type = other DNA
cgcctggctgaccgcccaacgacccccgcccattgacgtcaataatgacgtatgttcccatagtaacgccaatagggactttccattgacgtcaatgggtggagtatttacggtaaactgcccacttggcagtacatcaagtgtatcatatgccaagtacgccccctattgacgtcaatgacggtaaatggcccgcctggcattatgcccagtacatgaccttatgggactttcctacttggcagtacatctacgtattagtcatcgctattaccatggtgatgcggttttggcagtacatcaatgggcgtggatagcggtttgactcacggggatttccaagtctccaccccattgacgtcaatgggagtttgttttggcaccaaaatcaacgggactttccaaaatgtcgtaacaactccgccccattgacgcaaatgggcggtaggcgtgtacggtgggaggtctatataagcagagctggtttagtgaaccgtcagatccgctagcgctaccggactcagatcgccaccatgcccaagaagaaacggaaagtgggctccggggtcaaccccagaggcatgaccatctacctggaacactggaacctgaagcctctggaaatccctcagcggagccggctgtttagcctggaaccagtggctgtgggcacaccttatgccgagagcctgagcagctacctgcacagactggcccaggctcactgtctgaccagccagaaactggtcatgggcgagatcgcccctctgatcctgaaggacgaggacaagagcgagctgctgagcaagaacctgagccatctgctgggcaacagcgacgccaagcctaccatcaacggcatgagagagatgaccggcaagctggtcaccatcctggaagaactgaccatgcggcaggacctgcggtttctgacactgctgtcttggaagggcatgatctacgacaagggcctgttccgcaactacagagcctggtgtccttgctgctgggaagagtggatgcgcgagaacaagacaatctacgagcccctgctgtggtccttcaaggacgtggaattctgcgtgatccacaagcagcggctgatcgaggaatgccctcactgtggcagcagactgcccatcatggccaagtttagccctgccggcttctgcagcagatgctatggatggctgggccaagaagtgaagggcgaagaggaaatcgagaagtaccgcgtgaacatccagggcatctccgagctgattgccctgacacctcagctgggctacgagcctattcctatcgagctgacccggaaactgcagctgatcctgctggtgttcgagcaggccatcggcaaggatctgaacctgctgggcgatctgggcagaatcatggaaagcctgcggatcgccagcaagaccaaccagaaccagccttaccacctggtcaagctgatcatccccgtgtgcgagaaggccaagatcagcgtgtcccagctgttcggcctggactttcaagagctgggcaagatcctgttcggcaatttctccctggaactgaaactgggctccgggtccggggggtccggggccacaaacttttccctgctgaagcaggctggcgacgtggaggaaaaccccggacctatgcctaagaagaaaagaaaagtgggcagcggagtggccacacagcccaagatcagcctgtctctggatgccgccgacaccaccatcatgcacagagttggaatggccggcctgtacatgaccctgaagcggctggaaaagcagtaccccagcagcagacagagaggcggccacatttcttggagcctgaccgccgataccatcgagctgttttggcagggcagcgactttgtggccctgagctggctgatcaaagagagctttcagctggacgacaccggcctgatccacctgacaggcctggacaacgacgccatcaacctgagccagaagatccacatccacgagggaatctgcgccgtgttcctgcggctgaacaagttttaccaggccggcgagatcgtgaacaccgagctgacagtggaagagaagaaggtggaataccagtacaagagcctgacttggtacgcccaccaggcctttgccgagaagctgtgcgaagccgatacacagcagctgcggcacgactacgtgcagatcacaagctggctgtacctcggcggaattgtgcggcatgccagaacacagaacaccaccaagctggaagaaaagcccgagtacgccctggctctgctgtttgtgcctgtcgtgtgccactactgcctgctgcacatccctagcgaggacctgaaagagaaaaagccccacagatacctggtggtcatccccgagatcaaggacttcgaggatgccagccagagaagatggcggctgcagcagctggaaacaaagcagctgcacgtgtccagcctgggagaagccggcctgctgtactacagcctggacgatattcagcccgagggcgactactaccaggcctgccaagtttggctgtacgagaagatgaaccaggccagccggcagagaaccctgatgagcatcgaggaaatcgagatcgacaagaacaccctgatcacctaccagcaggtccagaagtactttcagcccaactatcagaagatcgagtacaagcagatcttcatcaaagtgaaccccattcggtccctgatcgccgacaatctggtcaccggaatccactggtggtccaacttttgggagaaactggtcatcgaggacagcaaagagtacctgttcaaccagatcttccccaaccgcgagggcttcatcagaatggccgagaacagcgaagaggacaagcactacctgatctttatcaaggtgttccagcaggccatgaagggcaacttcgccaagatgtacgccaaggccgaggacggcaaggaccctcctatcaagaaaaaagtggaacggctgcgggccgagctgaactactgttacgatgagctgagcttcaaagagtatctgagcgacttcctcgtcagaggtggcctgaacaaatacctgaaccagaatcaggccgagatcctgctgctgatcaagaagctgccctggcaagagctgagaatctgggccctgctggccattgccagctacaagcccaaagagaagcccatcagcaaggacgacagcctgacactgaacaaccagcagctcgaagagatgaacgacgagagcgaggaagaggggagcggctctggaggctctggagccacaaatttctctctgctgaaacaggctggggatgtggaggaaaatcctggacccatgcccaagaagaagaggaaggtgggatccggcgccgctctgctgatccagagcgaggaatacgtggacctgaccttcaagctgagaggcgcccctattcctctggacaacggctacgtgatctacagcgccctgagcagaatctgccccatcctgcacgagctggacaacatcggcattcaccctatcgccggcattcccaccagaaacaacctgctggaactgacagcccagagccggctgaaagtgcggattcaccaccagcagatccctctgatctacccctatctggccggacagaccttccacatcggccagaatagctaccagctggacatccccgactacaagcccctgatcagcagcgagagcgtgtacagcagactggtcatcatcaccggcttccaagagcctaccaacttcatcgaggccgtgcagcggaagctggataacaagggcatccagggcaagatcgagctgctgaccagacaggatggcacccctcagaagagacagctgaccatcaacaagcagggcaagcagttcaaagtgcgcggctttggcgtgcggatcagcgagctgaatcctgaggatagcctgacactgcaagagcagggcatctccggcaagcggaagatgatgtgcggcatcttcgtgcccgccaccagatccaaagaggaagaggaaaccggctctggaagcggcggaagcggcgctaccaactttagcctgctgaagcaggccggcgacgtggaggaaaacccagggcccatgcccaaaaagaagcggaaagtgggctccgggacagcccctctgatcctgtacctggatgtgcccttcgccaccttcagagagtctcacgccagagagatgggcaagacataccccgttcctccaccagccacagtgtacggcatgctgctgtctctcgtgggcgagacagacgtgtacagacactgcggagtggaactggccattgccatgctgagcatccccaagaagtcccggatcctgcggcagatgcggagattcaagaacgccgacttctctcaccccgagaacgtgatcccttgctaccaagagatcctgagcaacctgaagtgcctgatctgggtccgaagcgagggcgagaagatccagcctagcctgagagagagaatccagctggccctggatcaccctgaactcgtcagaagattcggctgcctgttcctgggcgagagcgaccagctgatcaagagcatcaagctggtgtcccaggactacctgcagggcgtcagacagtgggtcatcagagacaacagaggctggctgaccctgccttactgggttgaccacgtgggcagcagaaatacccggttcctgagataccggatcgaggaaatccctagcagccctcctcctgacctggcctggacaatgattcagagccccatcggaagcgggtccggagggtccggagccactaatttctccctgctgaaacaggcaggcgatgtggaagagaatcccgggcctatgcccaaaaagaaaaggaaggtgggatccggcatgagccagaagaagaacgacaacaacatccccaactactacctgtacggcaccgtgctgaccagatacggactggccagcctgaaccacgacatgcggagaggcaacaagaccacactgcagaaaggctactggaacggcaagatccacagcttcgtgggcagcagcgccattagatgggccctgaggttctatctgcagaaacagggctacctggtcaacagagtgtgggacgaagatgagcacatcaaccggctgaccaacgaggacttcgaccccgagcagttctacgacgacgacatcttcggcttcgccctgctggaaagcgccgagatcgaggaagagacaagcaccaccaagcggaagaagaagcagaccaagaccagcacaccccaccagagaatgggagccctggccatgaatatggccgtgtctctgaccccttacgatggcgccgtgaagctgggagccaagtctggcagagagaaggacagcaccagcctgcacttcaccgagtaccacgccaccagataccagtactacttcggcatcaacgccacacacctgaaggacttcagccggatcctgcctgtgatcgacggcatcatgaacctgcctaaagtcggcggcaacagcaatatcttcaactaccctttctgccccgacagcctggtgctgcagtggaccaacaatttcgccagctacatcagctactgcttcgagtactgcgaccctcagagcaaagaggccaagttcacccaagagttcatcgacgaggtggaatgcggccagatcgagccttctcagctctggatcggcggcaccatcgtgaaggatctgcagcagctggacaacttcgacgacagccccttcaagaaggcccacatctaccggaaccggaacgagctgatcgagaacctgaaaaccgtgatcacccggaacctgggcctcgaggaatccaagggatccggaagcgggggaagcggggccactaacttttctctgctgaagcaggcaggggacgtggaagagaaccctggccccatgtacccctacgacgtgccagactacgcccctaagaagaagagaaaagtcggcggctctggcggcggaggatctggcggaggtggaagcggaggaaaggaacagttcgagcagtgggtcgcccggctgcagatttctgaagccggccagaaaatcatcgagaaagtgcggagcagcgagcccagcagaagagttggcggcggaagcaaaaatgtggccggcagataccccagccggaagatgggagtgaccatccagttcgagagccacagagtggaactgcccgtgatctaccagctggaacacgacgaggacgtgctggaattctacgaccagcctcctcagatcaagctggactaccaggccagcaatggcagacgactgggagtgctgcacacccctgatctgttcgtgatcaggaccaatagcgccggctgggaagagtgcaagaccgagcaggatctgaagaagctggcccagaagaaccccaaccggtacttctacagccaagaggacaaccagtggcactgccctccaggcgaagtgtacgccgatcagttcggcctgtactaccggatcagaagcgacaaagaaatcaactgggtgctgcagcggaacctgcagttcctggaagattactaccgcagcgagagcctgggcgtcgaacaggctattgctcagtctctgctggccatcgtgtctagccagcctggaattacactggccgagctgctgcatcagcagacaggcgccaagagcgacgacatctacaccctgatcgtgcaagagcagatctacttcgacctgaacgccgctcctctggctgagcctgagagatgcctgatcttcagggatgagcagaccgccagcgcctacagactgatggtggaacagcccaacgtgtccctgcctgccatctctcccgtgatcaatatcgccaccggcacacccgtgtcctgggatggaaagggcctgaacatcatcctcgtgggcgagacagaagtgatcctgggcgccgagaatgaccagctgatcaagttcaagaaaaacgtgttcgaggaactcgtgcggcagggcgagatcacatctctgcagaccccagagaaaaccgacatcagcaccgagagctggcagcggttttaccaggcctctccagaggatcaggccgaggctctggaacggtacaagaccatcgagccctacctgaacggacaccctcctgagaacgagacaatccccgccagaaccatcagagactggaaggccaagtacctgacagccctgcagaagtacggctgcggctatatcggcctgctgtcccacagaagcgtgaagggcaacagacagagaaagctgcccgaggacaccctggccatcatggaaagattcattctcgaggactacgagacactgaagcagaaacggatgctggaagtgtatggcgccctggtgctggcttgtgaacagagcagtgtgatcgcccctagctacaaggccttcaccaaagaagtgaagcggcggaccggctacgagcagaccaagaagagacaaggcagaagggccgcctaccagtacgagagcttttactgggagctgacccagaaaacaccccggcacggcgatagacctttcgagatcggacacatcgatcacacccagctggacgtggaacttgtgtgctccagaaccggcagaaacctgggcagaccttgggccacctttctggtggatgcctactctagaaggctgctggccgtgtacctgaccttcgacagcccaagctaccggtcctgtctgatggtgctgcggatctgcgtgaagaggcatggcagactgcctcagatcgtggtggtggacaatggcaccgagttccacagcgtgtacttcgaaaccctgctggctaccttcgagtgcaccaagaagcagcggcctccagccaaggccagatttggcagcgtgtgcgagagactgttcggcaccagcaacacccagttcgtgcacaacctgctgggcaatacccagatcacccggaacgtgcggcaagtgaccaagagcgtgaaccccaagaatcaggccgtgtggacactgggactgctgtacgagtatctgtgcgcctgggcctacgaggtgtacgacacagatgaacaccccgctctgtttcagagccccagggatgcttttgccgccggaatggtcacaagcggcagcagactgcaccggatgatcccttacgacgagaacttccagatcctgacactgcccaccaccagcgagggcaaagccaaggtgcaagttggcagaggcgtgaagatcaacagcatctactactggtccaacagcttcagggacccacagatcgagaacaccagcgtgcccaccagatacgaccccttcaacatcggaatcgcctacgccttcgtcagaggccagtgggtgcagtgcatcagccagtactacagccagctgcagggcagatccgagaaagagctgaagctggctagcgccgagctgagaaagagaagcagcaactacggcagacagagccaggtgtccgccaagaacctggccgaatttctggccagcgtcgaggcccaagagacactgctggaacagagaagctacgacgccgaggccagagaagtgttcatcgtgatcgaaggcggcaaggccgccaccagcagaaatgagcagcctaagctgatccaggtgccgtttgagaacaccgacacacaggtggccgaggacgaggccattacacctgaaacactggtggtgtacgaggaattcagcctgtgactagcaacgttactggccgaagccgcttggaataaggccggtgtgcgtttgtctatatgttattttccaccatattgccgtcttttggcaatgtgagggcccggaaacctggccctgtcttcttgacgagcattcctaggggtctttcccctctcgccaaaggaatgcaaggtctgttgaatgtcgtgaaggaagcagttcctctggaagcttcttgaagacaaacaacgtctgtagcgaccctttgcaggcagcggaaccccccacctggcgacaggtgcctctgcggccaaaagccacgtgtataagatacacctgcaaaggcggcacaaccccagtgccacgttgtgagttggatagttgtggaaagagtcaaatggctctcctcaagcgtattcaacaaggggctgaaggatgcccagaaggtaccccattgtatgggatctgatctggggcctcggtgcacatgctttacatgtgtttagtcgaggttaaaaaaacgtctaggccccccgaaccacggggacgtggttttcctttgaaaaacacgatgataatatggccacaaccatggtgagcaagggcgaggagctgttcaccggggtggtgcccatcctggtcgagctggacggcgacgtaaacggccacaagttcagcgtgtccggcgagggcgagggcgatgccacctacggcaagctgaccctgaagttcatctgcaccaccggcaagctgcccgtgccctggcccaccctcgtgaccaccctgacctacggcgtgcagtgcttcagccgctaccccgaccacatgaagcagcacgacttcttcaagtccgccatgcccgaaggctacgtccaggagcgcaccatcttcttcaaggacgacggcaactacaagacccgcgccgaggtgaagttcgagggcgacaccctggtgaaccgcatcgagctgaagggcatcgacttcaaggaggacggcaacatcctggggcacaagctggagtacaactacaacagccacaacgtctatatcatggccgacaagcagaagaacggcatcaaggtgaacttcaagatccgccacaacatcgaggacggcagcgtgcagctcgccgaccactaccagcagaacacccccatcggcgacggccccgtgctgctgcccgacaaccactacctgagcacccagtccgccctgagcaaagaccccaacgagaagcgcgatcacatggtcctgctggagttcgtgaccgccgccgggatcactctcggcatggacgagctgtacaagggcagcggcagcggcgcaaccaatttcagcctgctgaaacaggccggcgatgtggaagagaatccaggccccatgtacccctacgacgtgccagactacgcccctaagaagaagagaaaagtcggcggctctggcggcggaggatctggcggaggtggaagcggaggaacccagaccaacggcttccctctggaactgctgaccagacctgctcctgagagactggcctacttcgagaactacaccgtgggacaccccagactgaaagaggtgtccgagatcctgatgcggacaatcgctgaacctgccggcgctagcttcatcttcgtgtatggacctagcggcgtgggcaagaccacactgagactgagagtggaacagaaactgaccgagctggtgctgcccctgctggaatctgatagaggcagagtgcctgtcgtgggcgttgaagctgtggcccctgagagcagaaacttcaactggaaggactactacacacgggccctgatcgccctggaagaacctctgatcgaccacaagttcgactacggcgtgcggggcatcagcagagacaacttcggcaagatcaacgtggaaagcaaggtggtggccccagctctgagaagggccctcgaaaatgccctgatccacagacaccccgacgtgttctttgtggacgaggcccagcactttggcaagatggccagcggctacaagctgcaggatcagctggattgcctgaagtccctggccaacatgaccggcatcctgcactgtctgctgggcacatacgagctgctgaccttcagaaacctgagcggccagctgtctcggagaagcgtggacatccacttcagacggtactgcgccgagaatcccgaagatgtgcaggccttcaagagcgtgctgctgactttccagcagcagatgcctctggccgaggctcctgatctggtgtctcactgggagtacttctacgagagaaccctgggctgcgtgggcatcctgaagaactggctgacaagagccctgaaggacgccctggatagagaagccaccaccgtgacactgaaggacctgcagaaacgcgcttggagcgtggcccagtgccagcggatgttcaaagagatccaagagggcgaaagacagctgagcgagacagagacagacatccagaacctgagatctgccctcggcctgggagccaagcctattgtgctgcctgaggaaacccctaagaccaccagacctccaggcaaagtgggcaaaagaaagcccaagagggaccccatcggagtgcagcaggatgtgtcttgacctcaggtgcaggctgcctatcagaaggtggtggctggtgtggccaatgccctggctcacaaataccactgagatctttttccctctgccaaaaattatggggacatcatgaagccccttgagcatctgacttctggctaataaaggaaatttattttcattgcaatagtgtgttggaattttttgtgtctctcactcggaaggacatatgggagggcaaatcatttaaaacatcagaatgagtatttggtttagagtttggcaacatatgcccatatgctggctgccatgaacaaaggttggctataaagaggtcatcagtatatgaaacagccccctgctgtccattccttattccatagaaaagccttgacttgaggttagattttttttatattttgttttgtgttatttttttctttaacatccctaaaattttccttacatgttttactagccagatttttcctcctctcctgactactcccagtcatagctgtccctcttctcttatggagatccctcgacctgcagcccaagcttggcgtaatcatggtcatagctgtttcctgtgtgaaattgttatccgctcacaattccacacaacatacgagccggaagcataaagtgtaaagcctggggtgcctaatgagtgagctaactcacattaattgcgttgcgctcactgcccgctttccagtcgggaaacctgtcgtgccagcggatccattccacagaattaaaaaattgagcaacgcctaacggcatcaagccacgaatcacaggcgtcgcgctggcgggcattcctgaagctgacagttgagcaacgcctaacggcatcaagccacgaatcacgtcctttccacaagatatataaagccaagaaatcgaaatactttcaagttacggtaagcatatgatagtccattttaaaacataattttaaaactgcaaactacccaagaaattattactttctacgtcacgtattttgtactaatatctttgtgtttacagtcaaattaattctaattatctctctaacagccttgtatcgtatatgcaaatatgaaggaatcatgggaaataggccctccgctgcattaatgaatcggccaacgcgcggggagaggcggtttgcgtattgggcgctgttccgcttcctcgctcactgactcgctgcgctcggtcgttcggctgcggcgagcggtatcagctcactcaaaggcggtaatacggttatccacagaatcaggggataacgcaggaaagaacatgtgagcaaaaggccagcaaaaggccaggaaccgtaaaaaggccgcgttgctggcgtttttccataggctccgcccccctgacgagcatcacaaaaatcgacgctcaagtcagaggtggcgaaacccgacaggactataaagataccaggcgtttccccctggaagctccctcgtgcgctctcctgttccgaccctgccgcttaccggatacctgtccgcctttctcccttcgggaagcgtggcgctttctcatagctcacgctgtaggtatctcagttcggtgtaggtcgttcgctccaagctgggctgtgtgcacgaaccccccgttcagcccgaccgctgcgccttatccggtaactatcgtcttgagtccaacccggtaagacacgacttatcgccactggcagcagccactggtaacaggattagcagagcgaggtatgtaggcggtgctacagagttcttgaagtggtggcctaactacggctacactagaagaacagtatttggtatctgcgctctgctgaagccagttaccttcggaaaaagagttggtagctcttgatccggcaaacaaaccaccgctggtagcggtggtttttttgtttgcaagcagcagattacgcgcagaaaaaaaggatctcaagaagatcctttgatcttttctacggggtctgacgctcagtggaacgaaaactcacgttaagggattttggtcatgagattatcaaaaaggatcttcacctagatccttttaaattaaaaatgaagttttaaatcaatctaaagtatatatgagtaaacttggtctgacagttaccaatgcttaatcagtgaggcacctatctcagcgatctgtctatttcgttcatccatagttgcctgactccccgtcgtgtagataactacgatacgggagggcttaccatctggccccagtgctgcaatgataccgcgagaaccacgctcaccggctccagatttatcagcaataaaccagccagccggaagggccgagcgcagaagtggtcctgcaactttatccgcctccatccagtctattaattgttgccgggaagctagagtaagtagttcgccagttaatagtttgcgcaacgttgttgccattgctacaggcatcgtggtgtcacgctcgtcgtttggtatggcttcattcagctccggttcccaacgatcaaggcgagttacatgatcccccatgttgtgcaaaaaagcggttagctccttcggtcctccgatcgttgtcagaagtaagttggccgcagtgttatcactcatggttatggcagcactgcataattctcttactgtcatgccatccgtaagatgcttttctgtgactggtgagtactcaaccaagtcattctgagaatagtgtatgcggcgaccgagttgctcttgcccggcgtcaatacgggataataccgcgccacatagcagaactttaaaagtgctcatcattggaaaacgttcttcggggcgaaaactctcaaggatcttaccgctgttgagatccagttcgatgtaacccactcgtgcacccaactgatcttcagcatcttttactttcaccagcgtttctgggtgagcaaaaacaggaaggcaaaatgccgcaaaaaagggaataagggcgacacggaaatgttgaatactcatactcttcctttttcaatattattgaagcatttatcagggttattgtctcatgagcggatacatatttgaatgtatttagaaaaataaacaaataggggttccgcgcacatttccccgaaaagtgccacctgggtcgacattgattattgactagtaatagtaatcaattacggggtcattagttcatagcccatatatggagttccgcgttacataacttacggtaaatggcc

SEQ ID NO: 755 - DNA, 14517 bp, synthetic construct
  misc_feature 1..14517: note = Synthetic
  source 1..14517: mol_type = other DNA
cgcctggctgaccgcccaacgacccccgcccattgacgtcaataatgacgtatgttcccatagtaacgccaatagggactttccattgacgtcaatgggtggagtatttacggtaaactgcccacttggcagtacatcaagtgtatcatatgccaagtacgccccctattgacgtcaatgacggtaaatggcccgcctggcattatgcccagtacatgaccttatgggactttcctacttggcagtacatctacgtattagtcatcgctattaccatggtgatgcggttttggcagtacatcaatgggcgtggatagcggtttgactcacggggatttccaagtctccaccccattgacgtcaatgggagtttgttttggcaccaaaatcaacgggactttccaaaatgtcgtaacaactccgccccattgacgcaaatgggcggtaggcgtgtacggtgggaggtctatataagcagagctggtttagtgaaccgtcagatccgctagcgctaccggactcagatcgccaccatgcccaagaagaaacggaaagtgggctccggggtcaaccccagaggcatgaccatctacctggaacactggaacctgaagcctctggaaatccctcagcggagccggctgtttagcctggaaccagtggctgtgggcacaccttatgccgagagcctgagcagctacctgcacagactggcccaggctcactgtctgaccagccagaaactggtcatgggcgagatcgcccctctgatcctgaaggacgaggacaagagcgagctgctgagcaagaacctgagccatctgctgggcaacagcgacgccaagcctaccatcaacggcatgagagagatgaccggcaagctggtcaccatcctggaagaactgaccatgcggcaggacctgcggtttctgacactgctgtcttggaagggcatgatctacgacaagggcctgttccgcaactacagagcctggtgtccttgctgctgggaagagtggatgcgcgagaacaagacaatctacgagcccctgctgtggtccttcaaggacgtggaattctgcgtgatccacaagcagcggctgatcgaggaatgccctcactgtggcagcagactgcccatcatggccaagtttagccctgccggcttctgcagcagatgctatggatggctgggccaagaagtgaagggcgaagaggaaatcgagaagtaccgcgtgaacatccagggcatctccgagctgattgccctgacacctcagctgggctacgagcctattcctatcgagctgacccggaaactgcagctgatcctgctggtgttcgagcaggccatcggcaaggatctgaacctgctgggcgatctgggcagaatcatggaaagcctgcggatcgccagcaagaccaaccagaaccagccttaccacctggtcaagctgatcatccccgtgtgcgagaaggccaagatcagcgtgtcccagctgttcggcctggactttcaagagctgggcaagatcctgttcggcaatttctccctggaactgaaactgggctccgggtccggggggtccggggccacaaacttttccctgctgaagcaggctggcgacgtggaggaaaaccccggacctatgcctaagaagaaaagaaaagtgggcagcggagtggccacacagcccaagatcagcctgtctctggatgccgccgacaccaccatcatgcacagagttggaatggccggcctgtacatgaccctgaagcggctggaaaagcagtaccccagcagcagacagagaggcggccacatttcttggagcctgaccgccgataccatcgagctgttttggcagggcagcgactttgtggccctgagctggctgatcaaagagagctttcagctggacgacaccggcctgatccacctgacaggcctggacaacgacgccatcaacctgagccagaagatccacatccacgagggaatctgcgccgtgttcctgcggctgaacaagttttaccaggccggcgagatcgtgaacaccgagctgacagtggaagagaagaaggtggaataccagtacaagagcctgacttggtacgcccaccaggcctttgccgagaagctgtgcgaagccgatacacagcagctgcggcacgactacgtgcagatcacaagctggctgtacctcggcggaattgtgcggcatgccagaacacagaacaccaccaagctggaagaaaagcccgagtacgccctggctctgctgtttgtgcctgtcgtgtgccactactgcctgctgcacatccctagcgaggacctgaaagagaaaaagccccacagatacctggtggtcatccccgagatcaaggacttcgaggatgccagccagagaagatggcggctgcagcagctggaaacaaagcagctgcacgtgtccagcctgggagaagccggcctgctgtactacagcctggacgatattcagcccgagggcgactactaccaggcctgccaagtttggctgtacgagaagatgaaccaggccagccggcagagaaccctgatgagcatcgaggaaatcgagatcgacaagaacaccctgatcacctaccagcaggtccagaagtactttcagcccaactatcagaagatcgagtacaagcagatcttcatcaaagtgaaccccattcggtccctgatcgccgacaatctggtcaccggaatccactggtggtccaacttttgggagaaactggtcatcgaggacagcaaagagtacctgttcaaccagatcttccccaaccgcgagggcttcatcagaatggccgagaacagcgaagaggacaagcactacctgatctttatcaaggtgttccagcaggccatgaagggcaacttcgccaagatgtacgccaaggccgaggacggcaaggaccctcctatcaagaaaaaagtggaacggctgcgggccgagctgaactactgttacgatgagctgagcttcaaagagtatctgagcgacttcctcgtcagaggtggcctgaacaaatacctgaaccagaatcaggccgagatcctgctgctgatcaagaagctgccctggcaagagctgagaatctgggccctgctggccattgccagctacaagcccaaagagaagcccatcagcaaggacgacagcctgacactgaacaaccagcagctcgaagagatgaacgacgagagcgaggaagaggggagcggctctggaggctctggagccacaaatttctctctgctgaaacaggctggggatgtggaggaaaatcctggacccatgcccaagaagaagaggaaggtgggatccggcgccgctctgctgatccagagcgaggaatacgtggacctgaccttcaagctgagaggcgcccctattcctctggacaacggctacgtgatctacagcgccctgagcagaatctgccccatcctgcacgagctggacaacatcggcattcaccctatcgccggcattcccaccagaaacaacctgctggaactgacagcccagagccggctgaaagtgcggattcaccaccagcagatccctctgatctacccctatctggccggacagaccttccacatcggccagaatagctaccagctggacatccccgactacaagcccctgatcagcagcgagagcgtgtacagcagactggtcatcatcaccggcttccaagagcctaccaacttcatcgaggccgtgcagcggaagctggataacaagggcatccagggcaagatcgagctgctgaccagacaggatggcacccctcagaagagacagctgaccatcaacaagcagggcaagcagttcaaagtgcgcggctttggcgtgcggatcagcgagctgaatcctgaggatagcctgacactgcaagagcagggcatctccggcaagcggaagatgatgtgcggcatcttcgtgcccgccaccagatccaaagaggaagaggaaaccggctctggaagcggcggaagcggcgctaccaactttagcctgctgaagcaggccggcgacgtggaggaaaacccagggcccatgcccaaaaagaagcggaaagtgggctccgggatgagccagaagaagaacgacaacaacatccccaactactacctgtacggcaccgtgctgaccagatacggactggccagcctgaaccacgacatgcggagaggcaacaagaccacactgcagaaaggctactggaacggcaagatccacagcttcgtgggcagcagcgccattagatgggccctgaggttctatctgcagaaacagggctacctggtcaacagagtgtgggacgaagatgagcacatcaaccggctgaccaacgaggacttcgaccccgagcagttctacgacgacgacatcttcggcttcgccctgctggaaagcgccgagatcgaggaagagacaagcaccaccaagcggaagaagaagcagaccaagaccagcacaccccaccagagaatgggagccctggccatgaatatggccgtgtctctgaccccttacgatggcgccgtgaagctgggagccaagtctggcagagagaaggacagcaccagcctgcacttcaccgagtaccacgccaccagataccagtactacttcggcatcaacgccacacacctgaaggacttcagccggatcctgcctgtgatcgacggcatcatgaacctgcctaaagtcggcggcaacagcaatatcttcaactaccctttctgccccgacagcctggtgctgcagtggaccaacaatttcgccagctacatcagctactgcttcgagtactgcgaccctcagagcaaagaggccaagttcacccaagagttcatcgacgaggtggaatgcggccagatcgagccttctcagctctggatcggcggcaccatcgtgaaggatctgcagcagctggacaacttcgacgacagccccttcaagaaggcccacatctaccggaaccggaacgagctgatcgagaacctgaaaaccgtgatcacccggaacctgggcctcgaggaatccaagggaagcgggtccggagggtccggagccactaatttctccctgctgaaacaggcaggcgatgtggaagagaatcccgggcctatgcccaaaaagaaaaggaaggtgggatccggcacagcccctctgatcctgtacctggatgtgcccttcgccaccttcagagagtctcacgccagagagatgggcaagacataccccgttcctccaccagccacagtgtacggcatgctgctgtctctcgtgggcgagacagacgtgtacagacactgcggagtggaactggccattgccatgctgagcatccccaagaagtcccggatcctgcggcagatgcggagattcaagaacgccgacttctctcaccccgagaacgtgatcccttgctaccaagagatcctgagcaacctgaagtgcctgatctgggtccgaagcgagggcgagaagatccagcctagcctgagagagagaatccagctggccctggatcaccctgaactcgtcagaagattcggctgcctgttcctgggcgagagcgaccagctgatcaagagcatcaagctggtgtcccaggactacctgcagggcgtcagacagtgggtcatcagagacaacagaggctggctgaccctgccttactgggttgaccacgtgggcagcagaaatacccggttcctgagataccggatcgaggaaatccctagcagccctcctcctgacctggcctggacaatgattcagagccccatcggatccggaagcgggggaagcggggccactaacttttctctgctgaagcaggcaggggacgtggaagagaaccctggccccatgtacccctacgacgtgccagactacgcccctaagaagaagagaaaagtcggcggctctggcggcggaggatctggcggaggtggaagcggaggaaaggaacagttcgagcagtgggtcgcccggctgcagatttctgaagccggccagaaaatcatcgagaaagtgcggagcagcgagcccagcagaagagttggcggcggaagcaaaaatgtggccggcagataccccagccggaagatgggagtgaccatccagttcgagagccacagagtggaactgcccgtgatctaccagctggaacacgacgaggacgtgctggaattctacgaccagcctcctcagatcaagctggactaccaggccagcaatggcagacgactgggagtgctgcacacccctgatctgttcgtgatcaggaccaatagcgccggctgggaagagtgcaagaccgagcaggatctgaagaagctggcccagaagaaccccaaccggtacttctacagccaagaggacaaccagtggcactgccctccaggcgaagtgtacgccgatcagttcggcctgtactaccggatcagaagcgacaaagaaatcaactgggtgctgcagcggaacctgcagttcctggaagattactaccgcagcgagagcctgggcgtcgaacaggctattgctcagtctctgctggccatcgtgtctagccagcctggaattacactggccgagctgctgcatcagcagacaggcgccaagagcgacgacatctacaccctgatcgtgcaagagcagatctacttcgacctgaacgccgctcctctggctgagcctgagagatgcctgatcttcagggatgagcagaccgccagcgcctacagactgatggtggaacagcccaacgtgtccctgcctgccatctctcccgtgatcaatatcgccaccggcacacccgtgtcctgggatggaaagggcctgaacatcatcctcgtgggcgagacagaagtgatcctgggcgccgagaatgaccagctgatcaagttcaagaaaaacgtgttcgaggaactcgtgcggcagggcgagatcacatctctgcagaccccagagaaaaccgacatcagcaccgagagctggcagcggttttaccaggcctctccagaggatcaggccgaggctctggaacggtacaagaccatcgagccctacctgaacggacaccctcctgagaacgagacaatccccgccagaaccatcagagactggaaggccaagtacctgacagccctgcagaagtacggctgcggctatatcggcctgctgtcccacagaagcgtgaagggcaacagacagagaaagctgcccgaggacaccctggccatcatggaaagattcattctcgaggactacgagacactgaagcagaaacggatgctggaagtgtatggcgccctggtgctggcttgtgaacagagcagtgtgatcgcccctagctacaaggccttcaccaaagaagtgaagcggcggaccggctacgagcagaccaagaagagacaaggcagaagggccgcctaccagtacgagagcttttactgggagctgacccagaaaacaccccggcacggcgatagacctttcgagatcggacacatcgatcacacccagctggacgtggaacttgtgtgctccagaaccggcagaaacctgggcagaccttgggccacctttctggtggatgcctactctagaaggctgctggccgtgtacctgaccttcgacagcccaagctaccggtcctgtctgatggtgctgcggatctgcgtgaagaggcatggcagactgcctcagatcgtggtggtggacaatggcaccgagttccacagcgtgtacttcgaaaccctgctggctaccttcgagtgcaccaagaagcagcggcctccagccaaggccagatttggcagcgtgtgcgagagactgttcggcaccagcaacacccagttcgtgcacaacctgctgggcaatacccagatcacccggaacgtgcggcaagtgaccaagagcgtgaaccccaagaatcaggccgtgtggacactgggactgctgtacgagtatctgtgcgcctgggcctacgaggtgtacgacacagatgaacaccccgctctgtttcagagccccagggatgcttttgccgccggaatggtcacaagcggcagcagactgcaccggatgatcccttacgacgagaacttccagatcctgacactgcccaccaccagcgagggcaaagccaaggtgcaagttggcagaggcgtgaagatcaacagcatctactactggtccaacagcttcagggacccacagatcgagaacaccagcgtgcccaccagatacgaccccttcaacatcggaatcgcctacgccttcgtcagaggccagtgggtgcagtgcatcagccagtactacagccagctgcagggcagatccgagaaagagctgaagctggctagcgccgagctgagaaagagaagcagcaactacggcagacagagccaggtgtccgccaagaacctggccgaatttctggccagcgtcgaggcccaagagacactgctggaacagagaagctacgacgccgaggccagagaagtgttcatcgtgatcgaaggcggcaaggccgccaccagcagaaatgagcagcctaagctgatccaggtgccgtttgagaacaccgacacacaggtggccgaggacgaggccattacacctgaaacactggtggtgtacgaggaattcagcctgtgactagcaacgttactggccgaagccgcttggaataaggccggtgtgcgtttgtctatatgttattttccaccatattgccgtcttttggcaatgtgagggcccggaaacctggccctgtcttcttgacgagcattcctaggggtctttcccctctcgccaaaggaatgcaaggtctgttgaatgtcgtgaaggaagcagttcctctggaagcttcttgaagacaaacaacgtctgtagcgaccctttgcaggcagcggaaccccccacctggcgacaggtgcctctgcggccaaaagccacgtgtataagatacacctgcaaaggcggcacaaccccagtgccacgttgtgagttggatagttgtggaaagagtcaaatggctctcctcaagcgtattcaacaaggggctgaaggatgcccagaaggtaccccattgtatgggatctgatctggggcctcggtgcacatgctttacatgtgtttagtcgaggttaaaaaaacgtctaggccccccgaaccacggggacgtggttttcctttgaaaaacacgatgataatatggccacaaccatggtgagcaagggcgaggagctgttcaccggggtggtgcccatcctggtcgagctggacggcgacgtaaacggccacaagttcagcgtgtccggcgagggcgagggcgatgccacctacggcaagctgaccctgaagttcatctgcaccaccggcaagctgcccgtgccctggcccaccctcgtgaccaccctgacctacggcgtgcagtgcttcagccgctaccccgaccacatgaagcagcacgacttcttcaagtccgccatgcccgaaggctacgtccaggagcgcaccatcttcttcaaggacgacggcaactacaagacccgcgccgaggtgaagttcgagggcgacaccctggtgaaccgcatcgagctgaagggcatcgacttcaaggaggacggcaacatcctggggcacaagctggagtacaactacaacagccacaacgtctatatcatggccgacaagcagaagaacggcatcaaggtgaacttcaagatccgccacaacatcgaggacggcagcgtgcagctcgccgaccactaccagcagaacacccccatcggcgacggccccgtgctgctgcccgacaaccactacctgagcacccagtccgccctgagcaaagaccccaacgagaagcgcgatcacatggtcctgctggagttcgtgaccgccgccgggatcactctcggcatggacgagctgtacaagggcagcggcagcggcgcaaccaatttcagcctgctgaaacaggccggcgatgtggaagagaatccaggccccatgtacccctacgacgtgccagactacgcccctaagaagaagagaaaagtcggcggctctggcggcggaggatctggcggaggtggaagcggaggaacccagaccaacggcttccctctggaactgctgaccagacctgctcctgagagactggcctacttcgagaactacaccgtgggacaccccagactgaaagaggtgtccgagatcctgatgcggacaatcgctgaacctgccggcgctagcttcatcttcgtgtatggacctagcggcgtgggcaagaccacactgagactgagagtggaacagaaactgaccgagctggtgctgcccctgctggaatctgatagaggcagagtgcctgtcgtgggcgttgaagctgtggcccctgagagcagaaacttcaactggaaggactactacacacgggccctgatcgccctggaagaacctctgatcgaccacaagttcgactacggcgtgcggggcatcagcagagacaacttcggcaagatcaacgtggaaagcaaggtggtggccccagctctgagaagggccctcgaaaatgccctgatccacagacaccccgacgtgttctttgtggacgaggcccagcactttggcaagatggccagcggctacaagctgcaggatcagctggattgcctgaagtccctggccaacatgaccggcatcctgcactgtctgctgggcacatacgagctgctgaccttcagaaacctgagcggccagctgtctcggagaagcgtggacatccacttcagacggtactgcgccgagaatcccgaagatgtgcaggccttcaagagcgtgctgctgactttccagcagcagatgcctctggccgaggctcctgatctggtgtctcactgggagtacttctacgagagaaccctgggctgcgtgggcatcctgaagaactggctgacaagagccctgaaggacgccctggatagagaagccaccaccgtgacactgaaggacctgcagaaacgcgcttggagcgtggcccagtgccagcggatgttcaaagagatccaagagggcgaaagacagctgagcgagacagagacagacatccagaacctgagatctgccctcggcctgggagccaagcctattgtgctgcctgaggaaacccctaagaccaccagacctccaggcaaagtgggcaaaagaaagcccaagagggaccccatcggagtgcagcaggatgtgtcttgacctcaggtgcaggctgcctatcagaaggtggtggctggtgtggccaatgccctggctcacaaataccactgagatctttttccctctgccaaaaattatggggacatcatgaagccccttgagcatctgacttctggctaataaaggaaatttattttcattgcaatagtgtgttggaattttttgtgtctctcactcggaaggacatatgggagggcaaatcatttaaaacatcagaatgagtatttggtttagagtttggcaacatatgcccatatgctggctgccatgaacaaaggttggctataaagaggtcatcagtatatgaaacagccccctgctgtccattccttattccatagaaaagccttgacttgaggttagattttttttatattttgttttgtgttatttttttctttaacatccctaaaattttccttacatgttttactagccagatttttcctcctctcctgactactcccagtcatagctgtccctcttctcttatggagatccctcgacctgcagcccaagcttggcgtaatcatggtcatagctgtttcctgtgtgaaattgttatccgctcacaattccacacaacatacgagccggaagcataaagtgtaaagcctggggtgcctaatgagtgagctaactcacattaattgcgttgcgctcactgcccgctttccagtcgggaaacctgtcgtgccagcggatccattccacagaattaaaaaattgagcaacgcctaacggcatcaagccacgaatcacaggcgtcgcgctggcgggcattcctgaagctgacagttgagcaacgcctaacggcatcaagccacgaatcacgtcctttccacaagatatataaagccaagaaatcgaaatactttcaagttacggtaagcatatgatagtccattttaaaacataattttaaaactgcaaactacccaagaaattattactttctacgtcacgtattttgtactaatatctttgtgtttacagtcaaattaattctaattatctctctaacagccttgtatcgtatatgcaaatatgaaggaatcatgggaaataggccctccgctgcattaatgaatcggccaacgcgcggggagaggcggtttgcgtattgggcgctgttccgcttcctcgctcactgactcgctgcgctcggtcgttcggctgcggcgagcggtatcagctcactcaaaggcggtaatacggttatccacagaatcaggggataacgcaggaaagaacatgtgagcaaaaggccagcaaaaggccaggaaccgtaaaaaggccgcgttgctggcgtttttccataggctccgcccccctgacgagcatcacaaaaatcgacgctcaagtcagaggtggcgaaacccgacaggactataaagataccaggcgtttccccctggaagctccctcgtgcgctctcctgttccgaccctgccgcttaccggatacctgtccgcctttctcccttcgggaagcgtggcgctttctcatagctcacgctgtaggtatctcagttcggtgtaggtcgttcgctccaagctgggctgtgtgcacgaaccccccgttcagcccgaccgctgcgccttatccggtaactatcgtcttgagtccaacccggtaagacacgacttatcgccactggcagcagccactggtaacaggattagcagagcgaggtatgtaggcggtgctacagagttcttgaagtggtggcctaactacggctacactagaagaacagtatttggtatctgcgctctgctgaagccagttaccttcggaaaaagagttggtagctcttgatccggcaaacaaaccaccgctggtagcggtggtttttttgtttgcaagcagcagattacgcgcagaaaaaaaggatctcaagaagatcctttgatcttttctacggggtctgacgctcagtggaacgaaaactcacgttaagggattttggtcatgagattatcaaaaaggatcttcacctagatccttttaaattaaaaatgaagttttaaatcaatctaaagtatatatgagtaaacttggtctgacagttaccaatgcttaatcagtgaggcacctatctcagcgatctgtctatttcgttcatccatagttgcctgactccccgtcgtgtagataactacgatacgggagggcttaccatctggccccagtgctgcaatgataccgcgagaaccacgctcaccggctccagatttatcagcaataaaccagccagccggaagggccgagcgcagaagtggtcctgcaactttatccgcctccatccagtctattaattgttgccgggaagctagagtaagtagttcgccagttaatagtttgcgcaacgttgttgccattgctacaggcatcgtggtgtcacgctcgtcgtttggtatggcttcattcagctccggttcccaacgatcaaggcgagttacatgatcccccatgttgtgcaaaaaagcggttagctccttcggtcctccgatcgttgtcagaagtaagttggccgcagtgttatcactcatggttatggcagcactgcataattctcttactgtcatgccatccgtaagatgcttttctgtgactggtgagtactcaaccaagtcattctgagaatagtgtatgcggcgaccgagttgctcttgcccggcgtcaatacgggataataccgcgccacatagcagaactttaaaagtgctcatcattggaaaacgttcttcggggcgaaaactctcaaggatcttaccgctgttgagatccagttcgatgtaacccactcgtgcacccaactgatcttcagcatcttttactttcaccagcgtttctgggtgagcaaaaacaggaaggcaaaatgccgcaaaaaagggaataagggcgacacggaaatgttgaatactcatactcttcctttttcaatattattgaagcatttatcagggttattgtctcatgagcggatacatatttgaatgtatttagaaaaataaacaaataggggttccgcgcacatttccccgaaaagtgccacctgggtcgacattgattattgactagtaatagtaatcaattacggggtcattagttcatagcccatatatggagttccgcgttacataacttacggtaaatggcc

SEQ ID NO: 756 - DNA, 14517 bp, synthetic construct
  misc_feature 1..14517: note = Synthetic
  source 1..14517: mol_type = other DNA
cgcctggctgaccgcccaacgacccccgcccattgacgtcaataatgacgtatgttcccatagtaacgccaatagggactttccattgacgtcaatgggtggagtatttacggtaaactgcccacttggcagtacatcaagtgtatcatatgccaagtacgccccctattgacgtcaatgacggtaaatggcccgcctggcattatgcccagtacatgaccttatgggactttcctacttggcagtacatctacgtattagtcatcgctattaccatggtgatgcggttttggcagtacatcaatgggcgtggatagcggtttgactcacggggatttccaagtctccaccccattgacgtcaatgggagtttgttttggcaccaaaatcaacgggactttccaaaatgtcgtaacaactccgccccattgacgcaaatgggcggtaggcgtgtacggtgggaggtctatataagcagagctggtttagtgaaccgtcagatccgctagcgctaccggactcagatcgccaccatgcccaagaagaaacggaaagtgggctccggggtcaaccccagaggcatgaccatctacctggaacactggaacctgaagcctctggaaatccctcagcggagccggctgtttagcctggaaccagtggctgtgggcacaccttatgccgagagcctgagcagctacctgcacagactggcccaggctcactgtctgaccagccagaaactggtcatgggcgagatcgcccctctgatcctgaaggacgaggacaagagcgagctgctgagcaagaacctgagccatctgctgggcaacagcgacgccaagcctaccatcaacggcatgagagagatgaccggcaagctggtcaccatcctggaagaactgaccatgcggcaggacctgcggtttctgacactgctgtcttggaagggcatgatctacgacaagggcctgttccgcaactacagagcctggtgtccttgctgctgggaagagtggatgcgcgagaacaagacaatctacgagcccctgctgtggtccttcaaggacgtggaattctgcgtgatccacaagcagcggctgatcgaggaatgccctcactgtggcagcagactgcccatcatggccaagtttagccctgccggcttctgcagcagatgctatggatggctgggccaagaagtgaagggcgaagaggaaatcgagaagtaccgcgtgaacatccagggcatctccgagctgattgccctgacacctcagctgggctacgagcctattcctatcgagctgacccggaaactgcagctgatcctgctggtgttcgagcaggccatcggcaaggatctgaacctgctgggcgatctgggcagaatcatggaaagcctgcggatcgccagcaagaccaaccagaaccagccttaccacctggtcaagctgatcatccccgtgtgcgagaaggccaagatcagcgtgtcccagctgttcggcctggactttcaagagctgggcaagatcctgttcggcaatttctccctggaactgaaactgggctccgggtccggggggtccggggccacaaacttttccctgctgaagcaggctggcgacgtggaggaaaaccccggacctatgcctaagaagaaaagaaaagtgggcagcggagtggccacacagcccaagatcagcctgtctctggatgccgccgacaccaccatcatgcacagagttggaatggccggcctgtacatgaccctgaagcggctggaaaagcagtaccccagcagcagacagagaggcggccacatttcttggagcctgaccgccgataccatcgagctgttttggcagggcagcgactttgtggccctgagctggctgatcaaagagagctttcagctggacgacaccggcctgatccacctgacaggcctggacaacgacgccatcaacctgagccagaagatccacatccacgagggaatctgcgccgtgttcctgcggctgaacaagttttaccaggccggcgagatcgtgaacaccgagctgacagtggaagagaagaaggtggaataccagtacaagagcctgacttggtacgcccaccaggcctttgccgagaagctgtgcgaagccgatacacagcagctgcggcacgactacgtgcagatcacaagctggctgtacctcggcggaattgtgcggcatgccagaacacagaacaccaccaagctggaagaaaagcccgagtacgccctggctctgctgtttgtgcctgtcgtgtgccactactgcctgctgcacatccctagcgaggacctgaaagagaaaaagccccacagatacctggtggtcatccccgagatcaaggacttcgaggatgccagccagagaagatggcggctgcagcagctggaaacaaagcagctgcacgtgtccagcctgggagaagccggcctgctgtactacagcctggacgatattcagcccgagggcgactactaccaggcctgccaagtttggctgtacgagaagatgaaccaggccagccggcagagaaccctgatgagcatcgaggaaatcgagatcgacaagaacaccctgatcacctaccagcaggtccagaagtactttcagcccaactatcagaagatcgagtacaagcagatcttcatcaaagtgaaccccattcggtccctgatcgccgacaatctggtcaccggaatccactggtggtccaacttttgggagaaactggtcatcgaggacagcaaagagtacctgttcaaccagatcttccccaaccgcgagggcttcatcagaatggccgagaacagcgaagaggacaagcactacctgatctttatcaaggtgttccagcaggccatgaagggcaacttcgccaagatgtacgccaaggccgaggacggcaaggaccctcctatcaagaaaaaagtggaacggctgcgggccgagctgaactactgttacgatgagctgagcttcaaagagtatctgagcgacttcctcgtcagaggtggcctgaacaaatacctgaaccagaatcaggccgagatcctgctgctgatcaagaagctgccctggcaagagctgagaatctgggccctgctggccattgccagctacaagcccaaagagaagcccatcagcaaggacgacagcctgacactgaacaaccagcagctcgaagagatgaacgacgagagcgaggaagaggggagcggctctggaggctctggagccacaaatttctctctgctgaaacaggctggggatgtggaggaaaatcctggacccatgcccaagaagaagaggaaggtgggatccggcatgagccagaagaagaacgacaacaacatccccaactactacctgtacggcaccgtgctgaccagatacggactggccagcctgaaccacgacatgcggagaggcaacaagaccacactgcagaaaggctactggaacggcaagatccacagcttcgtgggcagcagcgccattagatgggccctgaggttctatctgcagaaacagggctacctggtcaacagagtgtgggacgaagatgagcacatcaaccggctgaccaacgaggacttcgaccccgagcagttctacgacgacgacatcttcggcttcgccctgctggaaagcgccgagatcgaggaagagacaagcaccaccaagcggaagaagaagcagaccaagaccagcacaccccaccagagaatgggagccctggccatgaatatggccgtgtctctgaccccttacgatggcgccgtgaagctgggagccaagtctggcagagagaaggacagcaccagcctgcacttcaccgagtaccacgccaccagataccagtactacttcggcatcaacgccacacacctgaaggacttcagccggatcctgcctgtgatcgacggcatcatgaacctgcctaaagtcggcggcaacagcaatatcttcaactaccctttctgccccgacagcctggtgctgcagtggaccaacaatttcgccagctacatcagctactgcttcgagtactgcgaccctcagagcaaagaggccaagttcacccaagagttcatcgacgaggtggaatgcggccagatcgagccttctcagctctggatcggcggcaccatcgtgaaggatctgcagcagctggacaacttcgacgacagccccttcaagaaggcccacatctaccggaaccggaacgagctgatcgagaacctgaaaaccgtgatcacccggaacctgggcctcgaggaatccaagggctctggaagcggcggaagcggcgctaccaactttagcctgctgaagcaggccggcgacgtggaggaaaacccagggcccatgcccaaaaagaagcggaaagtgggctccgggacagcccctctgatcctgtacctggatgtgcccttcgccaccttcagagagtctcacgccagagagatgggcaagacataccccgttcctccaccagccacagtgtacggcatgctgctgtctctcgtgggcgagacagacgtgtacagacactgcggagtggaactggccattgccatgctgagcatccccaagaagtcccggatcctgcggcagatgcggagattcaagaacgccgacttctctcaccccgagaacgtgatcccttgctaccaagagatcctgagcaacctgaagtgcctgatctgggtccgaagcgagggcgagaagatccagcctagcctgagagagagaatccagctggccctggatcaccctgaactcgtcagaagattcggctgcctgttcctgggcgagagcgaccagctgatcaagagcatcaagctggtgtcccaggactacctgcagggcgtcagacagtgggtcatcagagacaacagaggctggctgaccctgccttactgggttgaccacgtgggcagcagaaatacccggttcctgagataccggatcgaggaaatccctagcagccctcctcctgacctggcctggacaatgattcagagccccatcggaagcgggtccggagggtccggagccactaatttctccctgctgaaacaggcaggcgatgtggaagagaatcccgggcctatgcccaaaaagaaaaggaaggtgggatccggcgccgctctgctgatccagagcgaggaatacgtggacctgaccttcaagctgagaggcgcccctattcctctggacaacggctacgtgatctacagcgccctgagcagaatctgccccatcctgcacgagctggacaacatcggcattcaccctatcgccggcattcccaccagaaacaacctgctggaactgacagcccagagccggctgaaagtgcggattcaccaccagcagatccctctgatctacccctatctggccggacagaccttccacatcggccagaatagctaccagctggacatccccgactacaagcccctgatcagcagcgagagcgtgtacagcagactggtcatcatcaccggcttccaagagcctaccaacttcatcgaggccgtgcagcggaagctggataacaagggcatccagggcaagatcgagctgctgaccagacaggatggcacccctcagaagagacagctgaccatcaacaagcagggcaagcagttcaaagtgcgcggctttggcgtgcggatcagcgagctgaatcctgaggatagcctgacactgcaagagcagggcatctccggcaagcggaagatgatgtgcggcatcttcgtgcccgccaccagatccaaagaggaagaggaaaccggatccggaagcgggggaagcggggccactaacttttctctgctgaagcaggcaggggacgtggaagagaaccctggccccatgtacccctacgacgtgccagactacgcccctaagaagaagagaaaagtcggcggctctggcggcggaggatctggcggaggtggaagcggaggaaaggaacagttcgagcagtgggtcgcccggctgcagatttctgaagccggccagaaaatcatcgagaaagtgcggagcagcgagcccagcagaagagttggcggcggaagcaaaaatgtggccggcagataccccagccggaagatgggagtgaccatccagttcgagagccacagagtggaactgcccgtgatctaccagctggaacacgacgaggacgtgctggaattctacgaccagcctcctcagatcaagctggactaccaggccagcaatggcagacgactgggagtgctgcacacccctgatctgttcgtgatcaggaccaatagcgccggctgggaagagtgcaagaccgagcaggatctgaagaagctggcccagaagaaccccaaccggtacttctacagccaagaggacaaccagtggcactgccctccaggcgaagtgtacgccgatcagttcggcctgtactaccggatcagaagcgacaaagaaatcaactgggtgctgcagcggaacctgcagttcctggaagattactaccgcagcgagagcctgggcgtcgaacaggctattgctcagtctctgctggccatcgtgtctagccagcctggaattacactggccgagctgctgcatcagcagacaggcgccaagagcgacgacatctacaccctgatcgtgcaagagcagatctacttcgacctgaacgccgctcctctggctgagcctgagagatgcctgatcttcagggatgagcagaccgccagcgcctacagactgatggtggaacagcccaacgtgtccctgcctgccatctctcccgtgatcaatatcgccaccggcacacccgtgtcctgggatggaaagggcctgaacatcatcctcgtgggcgagacagaagtgatcctgggcgccgagaatgaccagctgatcaagttcaagaaaaacgtgttcgaggaactcgtgcggcagggcgagatcacatctctgcagaccccagagaaaaccgacatcagcaccgagagctggcagcggttttaccaggcctctccagaggatcaggccgaggctctggaacggtacaagaccatcgagccctacctgaacggacaccctcctgagaacgagacaatccccgccagaaccatcagagactggaaggccaagtacctgacagccctgcagaagtacggctgcggctatatcggcctgctgtcccacagaagcgtgaagggcaacagacagagaaagctgcccgaggacaccctggccatcatggaaagattcattctcgaggactacgagacactgaagcagaaacggatgctggaagtgtatggcgccctggtgctggcttgtgaacagagcagtgtgatcgcccctagctacaaggccttcaccaaagaagtgaagcggcggaccggctacgagcagaccaagaagagacaaggcagaagggccgcctaccagtacgagagcttttactgggagctgacccagaaaacaccccggcacggcgatagacctttcgagatcggacacatcgatcacacccagctggacgtggaacttgtgtgctccagaaccggcagaaacctgggcagaccttgggccacctttctggtggatgcctactctagaaggctgctggccgtgtacctgaccttcgacagcccaagctaccggtcctgtctgatggtgctgcggatctgcgtgaagaggcatggcagactgcctcagatcgtggtggtggacaatggcaccgagttccacagcgtgtacttcgaaaccctgctggctaccttcgagtgcaccaagaagcagcggcctccagccaaggccagatttggcagcgtgtgcgagagactgttcggcaccagcaacacccagttcgtgcacaacctgctgggcaatacccagatcacccggaacgtgcggcaagtgaccaagagcgtgaaccccaagaatcaggccgtgtggacactgggactgctgtacgagtatctgtgcgcctgggcctacgaggtgtacgacacagatgaacaccccgctctgtttcagagccccagggatgcttttgccgccggaatggtcacaagcggcagcagactgcaccggatgatcccttacgacgagaacttccagatcctgacactgcccaccaccagcgagggcaaagccaaggtgcaagttggcagaggcgtgaagatcaacagcatctactactggtccaacagcttcagggacccacagatcgagaacaccagcgtgcccaccagatacgaccccttcaacatcggaatcgcctacgccttcgtcagaggccagtgggtgcagtgcatcagccagtactacagccagctgcagggcagatccgagaaagagctgaagctggctagcgccgagctgagaaagagaagcagcaactacggcagacagagccaggtgtccgccaagaacctggccgaatttctggccagcgtcgaggcccaagagacactgctggaacagagaagctacgacgccgaggccagagaagtgttcatcgtgatcgaaggcggcaaggccgccaccagcagaaatgagcagcctaagctgatccaggtgccgtttgagaacaccgacacacaggtggccgaggacgaggccattacacctgaaacactggtggtgtacgaggaattcagcctgtgactagcaacgttactggccgaagccgcttggaataaggccggtgtgcgtttgtctatatgttattttccaccatattgccgtcttttggcaatgtgagggcccggaaacctggccctgtcttcttgacgagcattcctaggggtctttcccctctcgccaaaggaatgcaaggtctgttgaatgtcgtgaaggaagcagttcctctggaagcttcttgaagacaaacaacgtctgtagcgaccctttgcaggcagcggaaccccccacctggcgacaggtgcctctgcggccaaaagccacgtgtataagatacacctgcaaaggcggcacaaccccagtgccacgttgtgagttggatagttgtggaaagagtcaaatggctctcctcaagcgtattcaacaaggggctgaaggatgcccagaaggtaccccattgtatgggatctgatctggggcctcggtgcacatgctttacatgtgtttagtcgaggttaaaaaaacgtctaggccccccgaaccacggggacgtggttttcctttgaaaaacacgatgataatatggccacaaccatggtgagcaagggcgaggagctgttcaccggggtggtgcccatcctggtcgagctggacggcgacgtaaacggccacaagttcagcgtgtccggcgagggcgagggcgatgccacctacggcaagctgaccctgaagttcatctgcaccaccggcaagctgcccgtgccctggcccaccctcgtgaccaccctgacctacggcgtgcagtgcttcagccgctaccccgaccacatgaagcagcacgacttcttcaagtccgccatgcccgaaggctacgtccaggagcgcaccatcttcttcaaggacgacggcaactacaagacccgcgccgaggtgaagttcgagggcgacaccctggtgaaccgcatcgagctgaagggcatcgacttcaaggaggacggcaacatcctggggcacaagctggagtacaactacaacagccacaacgtctatatcatggccgacaagcagaagaacggcatcaaggtgaacttcaagatccgccacaacatcgaggacggcagcgtgcagctcgccgaccactaccagcagaacacccccatcggcgacggccccgtgctgctgcccgacaaccactacctgagcacccagtccgccctgagcaaagaccccaacgagaagcgcgatcacatggtcctgctggagttcgtgaccgccgccgggatcactctcggcatggacgagctgtacaagggcagcggcagcggcgcaaccaatttcagcctgctgaaacaggccggcgatgtggaagagaatccaggccccatgtacccctacgacgtgccagactacgcccctaagaagaagagaaaagtcggcggctctggcggcggaggatctggcggaggtggaagcggaggaacccagaccaacggcttccctctggaactgctgaccagacctgctcctgagagactggcctacttcgagaactacaccgtgggacaccccagactgaaagaggtgtccgagatcctgatgcggacaatcgctgaacctgccggcgctagcttcatcttcgtgtatggacctagcggcgtgggcaagaccacactgagactgagagtggaacagaaactgaccgagctggtgctgcccctgctggaatctgatagaggcagagtgcctgtcgtgggcgttgaagctgtggcccctgagagcagaaacttcaactggaaggactactacacacgggccctgatcgccctggaagaacctctgatcgaccacaagttcgactacggcgtgcggggcatcagcagagacaacttcggcaagatcaacgtggaaagcaaggtggtggccccagctctgagaagggccctcgaaaatgccctgatccacagacaccccgacgtgttctttgtggacgaggcccagcactttggcaagatggccagcggctacaagctgcaggatcagctggattgcctgaagtccctggccaacatgaccggcatcctgcactgtctgctgggcacatacgagctgctgaccttcagaaacctgagcggccagctgtctcggagaagcgtggacatccacttcagacggtactgcgccgagaatcccgaagatgtgcaggccttcaagagcgtgctgctgactttccagcagcagatgcctctggccgaggctcctgatctggtgtctcactgggagtacttctacgagagaaccctgggctgcgtgggcatcctgaagaactggctgacaagagccctgaaggacgccctggatagagaagccaccaccgtgacactgaaggacctgcagaaacgcgcttggagcgtggcccagtgccagcggatgttcaaagagatccaagagggcgaaagacagctgagcgagacagagacagacatccagaacctgagatctgccctcggcctgggagccaagcctattgtgctgcctgaggaaacccctaagaccaccagacctccaggcaaagtgggcaaaagaaagcccaagagggaccccatcggagtgcagcaggatgtgtcttgacctcaggtgcaggctgcctatcagaaggtggtggctggtgtggccaatgccctggctcacaaataccactgagatctttttccctctgccaaaaattatggggacatcatgaagccccttgagcatctgacttctggctaataaaggaaatttattttcattgcaatagtgtgttggaattttttgtgtctctcactcggaaggacatatgggagggcaaatcatttaaaacatcagaatgagtatttggtttagagtttggcaacatatgcccatatgctggctgccatgaacaaaggttggctataaagaggtcatcagtatatgaaacagccccctgctgtccattccttattccatagaaaagccttgacttgaggttagattttttttatattttgttttgtgttatttttttctttaacatccctaaaattttccttacatgttttactagccagatttttcctcctctcctgactactcccagtcatagctgtccctcttctcttatggagatccctcgacctgcagcccaagcttggcgtaatcatggtcatagctgtttcctgtgtgaaattgttatccgctcacaattccacacaacatacgagccggaagcataaagtgtaaagcctggggtgcctaatgagtgagctaactcacattaattgcgttgcgctcactgcccgctttccagtcgggaaacctgtcgtgccagcggatccattccacagaattaaaaaattgagcaacgcctaacggcatcaagccacgaatcacaggcgtcgcgctggcgggcattcctgaagctgacagttgagcaacgcctaacggcatcaagccacgaatcacgtcctttccacaagatatataaagccaagaaatcgaaatactttcaagttacggtaagcatatgatagtccattttaaaacataattttaaaactgcaaactacccaagaaattattactttctacgtcacgtattttgtactaatatctttgtgtttacagtcaaattaattctaattatctctctaacagccttgtatcgtatatgcaaatatgaaggaatcatgggaaataggccctccgctgcattaatgaatcggccaacgcgcggggagaggcggtttgcgtattgggcgctgttccgcttcctcgctcactgactcgctgcgctcggtcgttcggctgcggcgagcggtatcagctcactcaaaggcggtaatacggttatccacagaatcaggggataacgcaggaaagaacatgtgagcaaaaggccagcaaaaggccaggaaccgtaaaaaggccgcgttgctggcgtttttccataggctccgcccccctgacgagcatcacaaaaatcgacgctcaagtcagaggtggcgaaacccgacaggactataaagataccaggcgtttccccctggaagctccctcgtgcgctctcctgttccgaccctgccgcttaccggatacctgtccgcctttctcccttcgggaagcgtggcgctttctcatagctcacgctgtaggtatctcagttcggtgtaggtcgttcgctccaagctgggctgtgtgcacgaaccccccgttcagcccgaccgctgcgccttatccggtaactatcgtcttgagtccaacccggtaagacacgacttatcgccactggcagcagccactggtaacaggattagcagagcgaggtatgtaggcggtgctacagagttcttgaagtggtggcctaactacggctacactagaagaacagtatttggtatctgcgctctgctgaagccagttaccttcggaaaaagagttggtagctcttgatccggcaaacaaaccaccgctggtagcggtggtttttttgtttgcaagcagcagattacgcgcagaaaaaaaggatctcaagaagatcctttgatcttttctacggggtctgacgctcagtggaacgaaaactcacgttaagggattttggtcatgagattatcaaaaaggatcttcacctagatccttttaaattaaaaatgaagttttaaatcaatctaaagtatatatgagtaaacttggtctgacagttaccaatgcttaatcagtgaggcacctatctcagcgatctgtctatttcgttcatccatagttgcctgactccccgtcgtgtagataactacgatacgggagggcttaccatctggccccagtgctgcaatgataccgcgagaaccacgctcaccggctccagatttatcagcaataaaccagccagccggaagggccgagcgcagaagtggtcctgcaactttatccgcctccatccagtctattaattgttgccgggaagctagagtaagtagttcgccagttaatagtttgcgcaacgttgttgccattgctacaggcatcgtggtgtcacgctcgtcgtttggtatggcttcattcagctccggttcccaacgatcaaggcgagttacatgatcccccatgttgtgcaaaaaagcggttagctccttcggtcctccgatcgttgtcagaagtaagttggccgcagtgttatcactcatggttatggcagcactgcataattctcttactgtcatgccatccgtaagatgcttttctgtgactggtgagtactcaaccaagtcattctgagaatagtgtatgcggcgaccgagttgctcttgcccggcgtcaatacgggataataccgcgccacatagcagaactttaaaagtgctcatcattggaaaacgttcttcggggcgaaaactctcaaggatcttaccgctgttgagatccagttcgatgtaacccactcgtgcacccaactgatcttcagcatcttttactttcaccagcgtttctgggtgagcaaaaacaggaaggcaaaatgccgcaaaaaagggaataagggcgacacggaaatgttgaatactcatactcttcctttttcaatattattgaagcatttatcagggttattgtctcatgagcggatacatatttgaatgtatttagaaaaataaacaaataggggttccgcgcacatttccccgaaaagtgccacctgggtcgacattgattattgactagtaatagtaatcaattacggggtcattagttcatagcccatatatggagttccgcgttacataacttacggtaaatggcc

SEQ ID NO: 757 - DNA, 14517 bp, synthetic construct
  misc_feature 1..14517: note = Synthetic
  source 1..14517: mol_type = other DNA
cgcctggctgaccgcccaacgacccccgcccattgacgtcaataatgacgtatgttcccatagtaacgccaatagggactttccattgacgtcaatgggtggagtatttacggtaaactgcccacttggcagtacatcaagtgtatcatatgccaagtacgccccctattgacgtcaatgacggtaaatggcccgcctggcattatgcccagtacatgaccttatgggactttcctacttggcagtacatctacgtattagtcatcgctattaccatggtgatgcggttttggcagtacatcaatgggcgtggatagcggtttgactcacggggatttccaagtctccaccccattgacgtcaatgggagtttgttttggcaccaaaatcaacgggactttccaaaatgtcgtaacaactccgccccattgacgcaaatgggcggtaggcgtgtacggtgggaggtctatataagcagagctggtttagtgaaccgtcagatccgctagcgctaccggactcagatcgccaccatgcccaagaagaaacggaaagtgggctccggggtcaaccccagaggcatgaccatctacctggaacactggaacctgaagcctctggaaatccctcagcggagccggctgtttagcctggaaccagtggctgtgggcacaccttatgccgagagcctgagcagctacctgcacagactggcccaggctcactgtctgaccagccagaaactggtcatgggcgagatcgcccctctgatcctgaaggacgaggacaagagcgagctgctgagcaagaacctgagccatctgctgggcaacagcgacgccaagcctaccatcaacggcatgagagagatgaccggcaagctggtcaccatcctggaagaactgaccatgcggcaggacctgcggtttctgacactgctgtcttggaagggcatgatctacgacaagggcctgttccgcaactacagagcctggtgtccttgctgctgggaagagtggatgcgcgagaacaagacaatctacgagcccctgctgtggtccttcaaggacgtggaattctgcgtgatccacaagcagcggctgatcgaggaatgccctcactgtggcagcagactgcccatcatggccaagtttagccctgccggcttctgcagcagatgctatggatggctgggccaagaagtgaagggcgaagaggaaatcgagaagtaccgcgtgaacatccagggcatctccgagctgattgccctgacacctcagctgggctacgagcctattcctatcgagctgacccggaaactgcagctgatcctgctggtgttcgagcaggccatcggcaaggatctgaacctgctgggcgatctgggcagaatcatggaaagcctgcggatcgccagcaagaccaaccagaaccagccttaccacctggtcaagctgatcatccccgtgtgcgagaaggccaagatcagcgtgtcccagctgttcggcctggactttcaagagctgggcaagatcctgttcggcaatttctccctggaactgaaactgggctccgggtccggggggtccggggccacaaacttttccctgctgaagcaggctggcgacgtggaggaaaaccccggacctatgcctaagaagaaaagaaaagtgggcagcggagtggccacacagcccaagatcagcctgtctctggatgccgccgacaccaccatcatgcacagagttggaatggccggcctgtacatgaccctgaagcggctggaaaagcagtaccccagcagcagacagagaggcggccacatttcttggagcctgaccgccgataccatcgagctgttttggcagggcagcgactttgtggccctgagctggctgatcaaagagagctttcagctggacgacaccggcctgatccacctgacaggcctggacaacgacgccatcaacctgagccagaagatccacatccacgagggaatctgcgccgtgttcctgcggctgaacaagttttaccaggccggcgagatcgtgaacaccgagctgacagtggaagagaagaaggtggaataccagtacaagagcctgacttggtacgcccaccaggcctttgccgagaagctgtgcgaagccgatacacagcagctgcggcacgactacgtgcagatcacaagctggctgtacctcggcggaattgtgcggcatgccagaacacagaacaccaccaagctggaagaaaagcccgagtacgccctggctctgctgtttgtgcctgtcgtgtgccactactgcctgctgcacatccctagcgaggacctgaaagagaaaaagccccacagatacctggtggtcatccccgagatcaaggacttcgaggatgccagccagagaagatggcggctgcagcagctggaaacaaagcagctgcacgtgtccagcctgggagaagccggcctgctgtactacagcctggacgatattcagcccgagggcgactactaccaggcctgccaagtttggctgtacgagaagatgaaccaggccagccggcagagaaccctgatgagcatcgaggaaatcgagatcgacaagaacaccctgatcacctaccagcaggtccagaagtactttcagcccaactatcagaagatcgagtacaagcagatcttcatcaaagtgaaccccattcggtccctgatcgccgacaatctggtcaccggaatccactggtggtccaacttttgggagaaactggtcatcgaggacagcaaagagtacctgttcaaccagatcttccccaaccgcgagggcttcatcagaatggccgagaacagcgaagaggacaagcactacctgatctttatcaaggtgttccagcaggccatgaagggcaacttcgccaagatgtacgccaaggccgaggacggcaaggaccctcctatcaagaaaaaagtggaacggctgcgggccgagctgaactactgttacgatgagctgagcttcaaagagtatctgagcgacttcctcgtcagaggtggcctgaacaaatacctgaaccagaatcaggccgagatcctgctgctgatcaagaagctgccctggcaagagctgagaatctgggccctgctggccattgccagctacaagcccaaagagaagcccatcagcaaggacgacagcctgacactgaacaaccagcagctcgaagagatgaacgacgagagcgaggaagaggggagcggctctggaggctctggagccacaaatttctctctgctgaaacaggctggggatgtggaggaaaatcctggacccatgcccaagaagaagaggaaggtgggatccggcatgagccagaagaagaacgacaacaacatccccaactactacctgtacggcaccgtgctgaccagatacggactggccagcctgaaccacgacatgcggagaggcaacaagaccacactgcagaaaggctactggaacggcaagatccacagcttcgtgggcagcagcgccattagatgggccctgaggttctatctgcagaaacagggctacctggtcaacagagtgtgggacgaagatgagcacatcaaccggctgaccaacgaggacttcgaccccgagcagttctacgacgacgacatcttcggcttcgccctgctggaaagcgccgagatcgaggaagagacaagcaccaccaagcggaagaagaagcagaccaagaccagcacaccccaccagagaatgggagccctggccatgaatatggccgtgtctctgaccccttacgatggcgccgtgaagctgggagccaagtctggcagagagaaggacagcaccagcctgcacttcaccgagtaccacgccaccagataccagtactacttcggcatcaacgccacacacctgaaggacttcagccggatcctgcctgtgatcgacggcatcatgaacctgcctaaagtcggcggcaacagcaatatcttcaactaccctttctgccccgacagcctggtgctgcagtggaccaacaatttcgccagctacatcagctactgcttcgagtactgcgaccctcagagcaaagaggccaagttcacccaagagttcatcgacgaggtggaatgcggccagatcgagccttctcagctctggatcggcggcaccatcgtgaaggatctgcagcagctggacaacttcgacgacagccccttcaagaaggcccacatctaccggaaccggaacgagctgatcgagaacctgaaaaccgtgatcacccggaacctgggcctcgaggaatccaagggctctggaagcggcggaagcggcgctaccaactttagcctgctgaagcaggccggcgacgtggaggaaaacccagggcccatgcccaaaaagaagcggaaagtgggctccggggccgctctgctgatccagagcgaggaatacgtggacctgaccttcaagctgagaggcgcccctattcctctggacaacggctacgtgatctacagcgccctgagcagaatctgccccatcctgcacgagctggacaacatcggcattcaccctatcgccggcattcccaccagaaacaacctgctggaactgacagcccagagccggctgaaagtgcggattcaccaccagcagatccctctgatctacccctatctggccggacagaccttccacatcggccagaatagctaccagctggacatccccgactacaagcccctgatcagcagcgagagcgtgtacagcagactggtcatcatcaccggcttccaagagcctaccaacttcatcgaggccgtgcagcggaagctggataacaagggcatccagggcaagatcgagctgctgaccagacaggatggcacccctcagaagagacagctgaccatcaacaagcagggcaagcagttcaaagtgcgcggctttggcgtgcggatcagcgagctgaatcctgaggatagcctgacactgcaagagcagggcatctccggcaagcggaagatgatgtgcggcatcttcgtgcccgccaccagatccaaagaggaagaggaaaccggaagcgggtccggagggtccggagccactaatttctccctgctgaaacaggcaggcgatgtggaagagaatcccgggcctatgcccaaaaagaaaaggaaggtgggatccggcacagcccctctgatcctgtacctggatgtgcccttcgccaccttcagagagtctcacgccagagagatgggcaagacataccccgttcctccaccagccacagtgtacggcatgctgctgtctctcgtgggcgagacagacgtgtacagacactgcggagtggaactggccattgccatgctgagcatccccaagaagtcccggatcctgcggcagatgcggagattcaagaacgccgacttctctcaccccgagaacgtgatcccttgctaccaagagatcctgagcaacctgaagtgcctgatctgggtccgaagcgagggcgagaagatccagcctagcctgagagagagaatccagctggccctggatcaccctgaactcgtcagaagattcggctgcctgttcctgggcgagagcgaccagctgatcaagagcatcaagctggtgtcccaggactacctgcagggcgtcagacagtgggtcatcagagacaacagaggctggctgaccctgccttactgggttgaccacgtgggcagcagaaatacccggttcctgagataccggatcgaggaaatccctagcagccctcctcctgacctggcctggacaatgattcagagccccatcggatccggaagcgggggaagcggggccactaacttttctctgctgaagcaggcaggggacgtggaagagaaccctggccccatgtacccctacgacgtgccagactacgcccctaagaagaagagaaaagtcggcggctctggcggcggaggatctggcggaggtggaagcggaggaaaggaacagttcgagcagtgggtcgcccggctgcagatttctgaagccggccagaaaatcatcgagaaagtgcggagcagcgagcccagcagaagagttggcggcggaagcaaaaatgtggccggcagataccccagccggaagatgggagtgaccatccagttcgagagccacagagtggaactgcccgtgatctaccagctggaacacgacgaggacgtgctggaattctacgaccagcctcctcagatcaagctggactaccaggccagcaatggcagacgactgggagtgctgcacacccctgatctgttcgtgatcaggaccaatagcgccggctgggaagagtgcaagaccgagcaggatctgaagaagctggcccagaagaaccccaaccggtacttctacagccaagaggacaaccagtggcactgccctccaggcgaagtgtacgccgatcagttcggcctgtactaccggatcagaagcgacaaagaaatcaactgggtgctgcagcggaacctgcagttcctggaagattactaccgcagcgagagcctgggcgtcgaacaggctattgctcagtctctgctggccatcgtgtctagccagcctggaattacactggccgagctgctgcatcagcagacaggcgccaagagcgacgacatctacaccctgatcgtgcaagagcagatctacttcgacctgaacgccgctcctctggctgagcctgagagatgcctgatcttcagggatgagcagaccgccagcgcctacagactgatggtggaacagcccaacgtgtccctgcctgccatctctcccgtgatcaatatcgccaccggcacacccgtgtcctgggatggaaagggcctgaacatcatcctcgtgggcgagacagaagtgatcctgggcgccgagaatgaccagctgatcaagttcaagaaaaacgtgttcgaggaactcgtgcggcagggcgagatcacatctctgcagaccccagagaaaaccgacatcagcaccgagagctggcagcggttttaccaggcctctccagaggatcaggccgaggctctggaacggtacaagaccatcgagccctacctgaacggacaccctcctgagaacgagacaatccccgccagaaccatcagagactggaaggccaagtacctgacagccctgcagaagtacggctgcggctatatcggcctgctgtcccacagaagcgtgaagggcaacagacagagaaagctgcccgaggacaccctggccatcatggaaagattcattctcgaggactacgagacactgaagcagaaacggatgctggaagtgtatggcgccctggtgctggcttgtgaacagagcagtgtgatcgcccctagctacaaggccttcaccaaagaagtgaagcggcggaccggctacgagcagaccaagaagagacaaggcagaagggccgcctaccagtacgagagcttttactgggagctgacccagaaaacaccccggcacggcgatagacctttcgagatcggacacatcgatcacacccagctggacgtggaacttgtgtgctccagaaccggcagaaacctgggcagaccttgggccacctttctggtggatgcctactctagaaggctgctggccgtgtacctgaccttcgacagcccaagctaccggtcctgtctgatggtgctgcggatctgcgtgaagaggcatggcagactgcctcagatcgtggtggtggacaatggcaccgagttccacagcgtgtacttcgaaaccctgctggctaccttcgagtgcaccaagaagcagcggcctccagccaaggccagatttggcagcgtgtgcgagagactgttcggcaccagcaacacccagttcgtgcacaacctgctgggcaatacccagatcacccggaacgtgcggcaagtgaccaagagcgtgaaccccaagaatcaggccgtgtggacactgggactgctgtacgagtatctgtgcgcctgggcctacgaggtgtacgacacagatgaacaccccgctctgtttcagagccccagggatgcttttgccgccggaatggtcacaagcggcagcagactgcaccggatgatcccttacgacgagaacttccagatcctgacactgcccaccaccagcgagggcaaagccaaggtgcaagttggcagaggcgtgaagatcaacagcatctactactggtccaacagcttcagggacccacagatcgagaacaccagcgtgcccaccagatacgaccccttcaacatcggaatcgcctacgccttcgtcagaggccagtgggtgcagtgcatcagccagtactacagccagctgcagggcagatccgagaaagagctgaagctggctagcgccgagctgagaaagagaagcagcaactacggcagacagagccaggtgtccgccaagaacctggccgaatttctggccagcgtcgaggcccaagagacactgctggaacagagaagctacgacgccgaggccagagaagtgttcatcgtgatcgaaggcggcaaggccgccaccagcagaaatgagcagcctaagctgatccaggtgccgtttgagaacaccgacacacaggtggccgaggacgaggccattacacctgaaacactggtggtgtacgaggaattcagcctgtgactagcaacgttactggccgaagccgcttggaataaggccggtgtgcgtttgtctatatgttattttccaccatattgccgtcttttggcaatgtgagggcccggaaacctggccctgtcttcttgacgagcattcctaggggtctttcccctctcgccaaaggaatgcaaggtctgttgaatgtcgtgaaggaagcagttcctctggaagcttcttgaagacaaacaacgtctgtagcgaccctttgcaggcagcggaaccccccacctggcgacaggtgcctctgcggccaaaagccacgtgtataagatacacctgcaaaggcggcacaaccccagtgccacgttgtgagttggatagttgtggaaagagtcaaatggctctcctcaagcgtattcaacaaggggctgaaggatgcccagaaggtaccccattgtatgggatctgatctggggcctcggtgcacatgctttacatgtgtttagtcgaggttaaaaaaacgtctaggccccccgaaccacggggacgtggttttcctttgaaaaacacgatgataatatggccacaaccatggtgagcaagggcgaggagctgttcaccggggtggtgcccatcctggtcgagctggacggcgacgtaaacggccacaagttcagcgtgtccggcgagggcgagggcgatgccacctacggcaagctgaccctgaagttcatctgcaccaccggcaagctgcccgtgccctggcccaccctcgtgaccaccctgacctacggcgtgcagtgcttcagccgctaccccgaccacatgaagcagcacgacttcttcaagtccgccatgcccgaaggctacgtccaggagcgcaccatcttcttcaaggacgacggcaactacaagacccgcgccgaggtgaagttcgagggcgacaccctggtgaaccgcatcgagctgaagggcatcgacttcaaggaggacggcaacatcctggggcacaagctggagtacaactacaacagccacaacgtctatatcatggccgacaagcagaagaacggcatcaaggtgaacttcaagatccgccacaacatcgaggacggcagcgtgcagctcgccgaccactaccagcagaacacccccatcggcgacggccccgtgctgctgcccgacaaccactacctgagcacccagtccgccctgagcaaagaccccaacgagaagcgcgatcacatggtcctgctggagttcgtgaccgccgccgggatcactctcggcatggacgagctgtacaagggcagcggcagcggcgcaaccaatttcagcctgctgaaacaggccggcgatgtggaagagaatccaggccccatgtacccctacgacgtgccagactacgcccctaagaagaagagaaaagtcggcggctctggcggcggaggatctggcggaggtggaagcggaggaacccagaccaacggcttccctctggaactgctgaccagacctgctcctgagagactggcctacttcgagaactacaccgtgggacaccccagactgaaagaggtgtccgagatcctgatgcggacaatcgctgaacctgccggcgctagcttcatcttcgtgtatggacctagcggcgtgggcaagaccacactgagactgagagtggaacagaaactgaccgagctggtgctgcccctgctggaatctgatagaggcagagtgcctgtcgtgggcgttgaagctgtggcccctgagagcagaaacttcaactggaaggactactacacacgggccctgatcgccctggaagaacctctgatcgaccacaagttcgactacggcgtgcggggcatcagcagagacaacttcggcaagatcaacgtggaaagcaaggtggtggccccagctctgagaagggccctcgaaaatgccctgatccacagacaccccgacgtgttctttgtggacgaggcccagcactttggcaagatggccagcggctacaagctgcaggatcagctggattgcctgaagtccctggccaacatgaccggcatcctgcactgtctgctgggcacatacgagctgctgaccttcagaaacctgagcggccagctgtctcggagaagcgtggacatccacttcagacggtactgcgccgagaatcccgaagatgtgcaggccttcaagagcgtgctgctgactttccagcagcagatgcctctggccgaggctcctgatctggtgtctcactgggagtacttctacgagagaaccctgggctgcgtgggcatcctgaagaactggctgacaagagccctgaaggacgccctggatagagaagccaccaccgtgacactgaaggacctgcagaaacgcgcttggagcgtggcccagtgccagcggatgttcaaagagatccaagagggcgaaagacagctgagcgagacagagacagacatccagaacctgagatctgccctcggcctgggagccaagcctattgtgctgcctgaggaaacccctaagaccaccagacctccaggcaaagtgggcaaaagaaagcccaagagggaccccatcggagtgcagcaggatgtgtcttgacctcaggtgcaggctgcctatcagaaggtggtggctggtgtggccaatgccctggctcacaaataccactgagatctttttccctctgccaaaaattatggggacatcatgaagccccttgagcatctgacttctggctaataaaggaaatttattttcattgcaatagtgtgttggaattttttgtgtctctcactcggaaggacatatgggagggcaaatcatttaaaacatcagaatgagtatttggtttagagtttggcaacatatgcccatatgctggctgccatgaacaaaggttggctataaagaggtcatcagtatatgaaacagccccctgctgtccattccttattccatagaaaagccttgacttgaggttagattttttttatattttgttttgtgttatttttttctttaacatccctaaaattttccttacatgttttactagccagatttttcctcctctcctgactactcccagtcatagctgtccctcttctcttatggagatccctcgacctgcagcccaagcttggcgtaatcatggtcatagctgtttcctgtgtgaaattgttatccgctcacaattccacacaacatacgagccggaagcataaagtgtaaagcctggggtgcctaatgagtgagctaactcacattaattgcgttgcgctcactgcccgctttccagtcgggaaacctgtcgtgccagcggatccattccacagaattaaaaaattgagcaacgcctaacggcatcaagccacgaatcacaggcgtcgcgctggcgggcattcctgaagctgacagttgagcaacgcctaacggcatcaagccacgaatcacgtcctttccacaagatatataaagccaagaaatcgaaatactttcaagttacggtaagcatatgatagtccattttaaaacataattttaaaactgcaaactacccaagaaattattactttctacgtcacgtattttgtactaatatctttgtgtttacagtcaaattaattctaattatctctctaacagccttgtatcgtatatgcaaatatgaaggaatcatgggaaataggccctccgctgcattaatgaatcggccaacgcgcggggagaggcggtttgcgtattgggcgctgttccgcttcctcgctcactgactcgctgcgctcggtcgttcggctgcggcgagcggtatcagctcactcaaaggcggtaatacggttatccacagaatcaggggataacgcaggaaagaacatgtgagcaaaaggccagcaaaaggccaggaaccgtaaaaaggccgcgttgctggcgtttttccataggctccgcccccctgacgagcatcacaaaaatcgacgctcaagtcagaggtggcgaaacccgacaggactataaagataccaggcgtttccccctggaagctccctcgtgcgctctcctgttccgaccctgccgcttaccggatacctgtccgcctttctcccttcgggaagcgtggcgctttctcatagctcacgctgtaggtatctcagttcggtgtaggtcgttcgctccaagctgggctgtgtgcacgaaccccccgttcagcccgaccgctgcgccttatccggtaactatcgtcttgagtccaacccggtaagacacgacttatcgccactggcagcagccactggtaacaggattagcagagcgaggtatgtaggcggtgctacagagttcttgaagtggtggcctaactacggctacactagaagaacagtatttggtatctgcgctctgctgaagccagttaccttcggaaaaagagttggtagctcttgatccggcaaacaaaccaccgctggtagcggtggtttttttgtttgcaagcagcagattacgcgcagaaaaaaaggatctcaagaagatcctttgatcttttctacggggtctgacgctcagtggaacgaaaactcacgttaagggattttggtcatgagattatcaaaaaggatcttcacctagatccttttaaattaaaaatgaagttttaaatcaatctaaagtatatatgagtaaacttggtctgacagttaccaatgcttaatcagtgaggcacctatctcagcgatctgtctatttcgttcatccatagttgcctgactccccgtcgtgtagataactacgatacgggagggcttaccatctggccccagtgctgcaatgataccgcgagaaccacgctcaccggctccagatttatcagcaataaaccagccagccggaagggccgagcgcagaagtggtcctgcaactttatccgcctccatccagtctattaattgttgccgggaagctagagtaagtagttcgccagttaatagtttgcgcaacgttgttgccattgctacaggcatcgtggtgtcacgctcgtcgtttggtatggcttcattcagctccggttcccaacgatcaaggcgagttacatgatcccccatgttgtgcaaaaaagcggttagctccttcggtcctccgatcgttgtcagaagtaagttggccgcagtgttatcactcatggttatggcagcactgcataattctcttactgtcatgccatccgtaagatgcttttctgtgactggtgagtactcaaccaagtcattctgagaatagtgtatgcggcgaccgagttgctcttgcccggcgtcaatacgggataataccgcgccacatagcagaactttaaaagtgctcatcattggaaaacgttcttcggggcgaaaactctcaaggatcttaccgctgttgagatccagttcgatgtaacccactcgtgcacccaactgatcttcagcatcttttactttcaccagcgtttctgggtgagcaaaaacaggaaggcaaaatgccgcaaaaaagggaataagggcgacacggaaatgttgaatactcatactcttcctttttcaatattattgaagcatttatcagggttattgtctcatgagcggatacatatttgaatgtatttagaaaaataaacaaataggggttccgcgcacatttccccgaaaagtgccacctgggtcgacattgattattgactagtaatagtaatcaattacggggtcattagttcatagcccatatatggagttccgcgttacataacttacggtaaatggcc

SEQ ID NO: 758 - DNA, 14517 bp, synthetic construct
  misc_feature 1..14517: note = Synthetic
  source 1..14517: mol_type = other DNA
cgcctggctgaccgcccaacgacccccgcccattgacgtcaataatgacgtatgttcccatagtaacgccaatagggactttccattgacgtcaatgggtggagtatttacggtaaactgcccacttggcagtacatcaagtgtatcatatgccaagtacgccccctattgacgtcaatgacggtaaatggcccgcctggcattatgcccagtacatgaccttatgggactttcctacttggcagtacatctacgtattagtcatcgctattaccatggtgatgcggttttggcagtacatcaatgggcgtggatagcggtttgactcacggggatttccaagtctccaccccattgacgtcaatgggagtttgttttggcaccaaaatcaacgggactttccaaaatgtcgtaacaactccgccccattgacgcaaatgggcggtaggcgtgtacggtgggaggtctatataagcagagctggtttagtgaaccgtcagatccgctagcgctaccggactcagatcgccaccatgcccaagaagaaacggaaagtgggctccggggtcaaccccagaggcatgaccatctacctggaacactggaacctgaagcctctggaaatccctcagcggagccggctgtttagcctggaaccagtggctgtgggcacaccttatgccgagagcctgagcagctacctgcacagactggcccaggctcactgtctgaccagccagaaactggtcatgggcgagatcgcccctctgatcctgaaggacgaggacaagagcgagctgctgagcaagaacctgagccatctgctgggcaacagcgacgccaagcctaccatcaacggcatgagagagatgaccggcaagctggtcaccatcctggaagaactgaccatgcggcaggacctgcggtttctgacactgctgtcttggaagggcatgatctacgacaagggcctgttccgcaactacagagcctggtgtccttgctgctgggaagagtggatgcgcgagaacaagacaatctacgagcccctgctgtggtccttcaaggacgtggaattctgcgtgatccacaagcagcggctgatcgaggaatgccctcactgtggcagcagactgcccatcatggccaagtttagccctgccggcttctgcagcagatgctatggatggctgggccaagaagtgaagggcgaagaggaaatcgagaagtaccgcgtgaacatccagggcatctccgagctgattgccctgacacctcagctgggctacgagcctattcctatcgagctgacccggaaactgcagctgatcctgctggtgttcgagcaggccatcggcaaggatctgaacctgctgggcgatctgggcagaatcatggaaagcctgcggatcgccagcaagaccaaccagaaccagccttaccacctggtcaagctgatcatccccgtgtgcgagaaggccaagatcagcgtgtcccagctgttcggcctggactttcaagagctgggcaagatcctgttcggcaatttctccctggaactgaaactgggctccgggtccggggggtccggggccacaaacttttccctgctgaagcaggctggcgacgtggaggaaaaccccggacctatgcctaagaagaaaagaaaagtgggcagcggagccgctctgctgatccagagcgaggaatacgtggacctgaccttcaagctgagaggcgcccctattcctctggacaacggctacgtgatctacagcgccctgagcagaatctgccccatcctgcacgagctggacaacatcggcattcaccctatcgccggcattcccaccagaaacaacctgctggaactgacagcccagagccggctgaaagtgcggattcaccaccagcagatccctctgatctacccctatctggccggacagaccttccacatcggccagaatagctaccagctggacatccccgactacaagcccctgatcagcagcgagagcgtgtacagcagactggtcatcatcaccggcttccaagagcctaccaacttcatcgaggccgtgcagcggaagctggataacaagggcatccagggcaagatcgagctgctgaccagacaggatggcacccctcagaagagacagctgaccatcaacaagcagggcaagcagttcaaagtgcgcggctttggcgtgcggatcagcgagctgaatcctgaggatagcctgacactgcaagagcagggcatctccggcaagcggaagatgatgtgcggcatcttcgtgcccgccaccagatccaaagaggaagaggaaaccgggagcggctctggaggctctggagccacaaatttctctctgctgaaacaggctggggatgtggaggaaaatcctggacccatgcccaagaagaagaggaaggtgggatccggcgtggccacacagcccaagatcagcctgtctctggatgccgccgacaccaccatcatgcacagagttggaatggccggcctgtacatgaccctgaagcggctggaaaagcagtaccccagcagcagacagagaggcggccacatttcttggagcctgaccgccgataccatcgagctgttttggcagggcagcgactttgtggccctgagctggctgatcaaagagagctttcagctggacgacaccggcctgatccacctgacaggcctggacaacgacgccatcaacctgagccagaagatccacatccacgagggaatctgcgccgtgttcctgcggctgaacaagttttaccaggccggcgagatcgtgaacaccgagctgacagtggaagagaagaaggtggaataccagtacaagagcctgacttggtacgcccaccaggcctttgccgagaagctgtgcgaagccgatacacagcagctgcggcacgactacgtgcagatcacaagctggctgtacctcggcggaattgtgcggcatgccagaacacagaacaccaccaagctggaagaaaagcccgagtacgccctggctctgctgtttgtgcctgtcgtgtgccactactgcctgctgcacatccctagcgaggacctgaaagagaaaaagccccacagatacctggtggtcatccccgagatcaaggacttcgaggatgccagccagagaagatggcggctgcagcagctggaaacaaagcagctgcacgtgtccagcctgggagaagccggcctgctgtactacagcctggacgatattcagcccgagggcgactactaccaggcctgccaagtttggctgtacgagaagatgaaccaggccagccggcagagaaccctgatgagcatcgaggaaatcgagatcgacaagaacaccctgatcacctaccagcaggtccagaagtactttcagcccaactatcagaagatcgagtacaagcagatcttcatcaaagtgaaccccattcggtccctgatcgccgacaatctggtcaccggaatccactggtggtccaacttttgggagaaactggtcatcgaggacagcaaagagtacctgttcaaccagatcttccccaaccgcgagggcttcatcagaatggccgagaacagcgaagaggacaagcactacctgatctttatcaaggtgttccagcaggccatgaagggcaacttcgccaagatgtacgccaaggccgaggacggcaaggaccctcctatcaagaaaaaagtggaacggctgcgggccgagctgaactactgttacgatgagctgagcttcaaagagtatctgagcgacttcctcgtcagaggtggcctgaacaaatacctgaaccagaatcaggccgagatcctgctgctgatcaagaagctgccctggcaagagctgagaatctgggccctgctggccattgccagctacaagcccaaagagaagcccatcagcaaggacgacagcctgacactgaacaaccagcagctcgaagagatgaacgacgagagcgaggaagagggctctggaagcggcggaagcggcgctaccaactttagcctgctgaagcaggccggcgacgtggaggaaaacccagggcccatgcccaaaaagaagcggaaagtgggctccgggatgagccagaagaagaacgacaacaacatccccaactactacctgtacggcaccgtgctgaccagatacggactggccagcctgaaccacgacatgcggagaggcaacaagaccacactgcagaaaggctactggaacggcaagatccacagcttcgtgggcagcagcgccattagatgggccctgaggttctatctgcagaaacagggctacctggtcaacagagtgtgggacgaagatgagcacatcaaccggctgaccaacgaggacttcgaccccgagcagttctacgacgacgacatcttcggcttcgccctgctggaaagcgccgagatcgaggaagagacaagcaccaccaagcggaagaagaagcagaccaagaccagcacaccccaccagagaatgggagccctggccatgaatatggccgtgtctctgaccccttacgatggcgccgtgaagctgggagccaagtctggcagagagaaggacagcaccagcctgcacttcaccgagtaccacgccaccagataccagtactacttcggcatcaacgccacacacctgaaggacttcagccggatcctgcctgtgatcgacggcatcatgaacctgcctaaagtcggcggcaacagcaatatcttcaactaccctttctgccccgacagcctggtgctgcagtggaccaacaatttcgccagctacatcagctactgcttcgagtactgcgaccctcagagcaaagaggccaagttcacccaagagttcatcgacgaggtggaatgcggccagatcgagccttctcagctctggatcggcggcaccatcgtgaaggatctgcagcagctggacaacttcgacgacagccccttcaagaaggcccacatctaccggaaccggaacgagctgatcgagaacctgaaaaccgtgatcacccggaacctgggcctcgaggaatccaagggaagcgggtccggagggtccggagccactaatttctccctgctgaaacaggcaggcgatgtggaagagaatcccgggcctatgcccaaaaagaaaaggaaggtgggatccggcacagcccctctgatcctgtacctggatgtgcccttcgccaccttcagagagtctcacgccagagagatgggcaagacataccccgttcctccaccagccacagtgtacggcatgctgctgtctctcgtgggcgagacagacgtgtacagacactgcggagtggaactggccattgccatgctgagcatccccaagaagtcccggatcctgcggcagatgcggagattcaagaacgccgacttctctcaccccgagaacgtgatcccttgctaccaagagatcctgagcaacctgaagtgcctgatctgggtccgaagcgagggcgagaagatccagcctagcctgagagagagaatccagctggccctggatcaccctgaactcgtcagaagattcggctgcctgttcctgggcgagagcgaccagctgatcaagagcatcaagctggtgtcccaggactacctgcagggcgtcagacagtgggtcatcagagacaacagaggctggctgaccctgccttactgggttgaccacgtgggcagcagaaatacccggttcctgagataccggatcgaggaaatccctagcagccctcctcctgacctggcctggacaatgattcagagccccatcggatccggaagcgggggaagcggggccactaacttttctctgctgaagcaggcaggggacgtggaagagaaccctggccccatgtacccctacgacgtgccagactacgcccctaagaagaagagaaaagtcggcggctctggcggcggaggatctggcggaggtggaagcggaggaaaggaacagttcgagcagtgggtcgcccggctgcagatttctgaagccggccagaaaatcatcgagaaagtgcggagcagcgagcccagcagaagagttggcggcggaagcaaaaatgtggccggcagataccccagccggaagatgggagtgaccatccagttcgagagccacagagtggaactgcccgtgatctaccagctggaacacgacgaggacgtgctggaattctacgaccagcctcctcagatcaagctggactaccaggccagcaatggcagacgactgggagtgctgcacacccctgatctgttcgtgatcaggaccaatagcgccggctgggaagagtgcaagaccgagcaggatctgaagaagctggcccagaagaaccccaaccggtacttctacagccaagaggacaaccagtggcactgccctccaggcgaagtgtacgccgatcagttcggcctgtactaccggatcagaagcgacaaagaaatcaactgggtgctgcagcggaacctgcagttcctggaagattactaccgcagcgagagcctgggcgtcgaacaggctattgctcagtctctgctggccatcgtgtctagccagcctggaattacactggccgagctgctgcatcagcagacaggcgccaagagcgacgacatctacaccctgatcgtgcaagagcagatctacttcgacctgaacgccgctcctctggctgagcctgagagatgcctgatcttcagggatgagcagaccgccagcgcctacagactgatggtggaacagcccaacgtgtccctgcctgccatctctcccgtgatcaatatcgccaccggcacacccgtgtcctgggatggaaagggcctgaacatcatcctcgtgggcgagacagaagtgatcctgggcgccgagaatgaccagctgatcaagttcaagaaaaacgtgttcgaggaactcgtgcggcagggcgagatcacatctctgcagaccccagagaaaaccgacatcagcaccgagagctggcagcggttttaccaggcctctccagaggatcaggccgaggctctggaacggtacaagaccatcgagccctacctgaacggacaccctcctgagaacgagacaatccccgccagaaccatcagagactggaaggccaagtacctgacagccctgcagaagtacggctgcggctatatcggcctgctgtcccacagaagcgtgaagggcaacagacagagaaagctgcccgaggacaccctggccatcatggaaagattcattctcgaggactacgagacactgaagcagaaacggatgctggaagtgtatggcgccctggtgctggcttgtgaacagagcagtgtgatcgcccctagctacaaggccttcaccaaagaagtgaagcggcggaccggctacgagcagaccaagaagagacaaggcagaagggccgcctaccagtacgagagcttttactgggagctgacccagaaaacaccccggcacggcgatagacctttcgagatcggacacatcgatcacacccagctggacgtggaacttgtgtgctccagaaccggcagaaacctgggcagaccttgggccacctttctggtggatgcctactctagaaggctgctggccgtgtacctgaccttcgacagcccaagctaccggtcctgtctgatggtgctgcggatctgcgtgaagaggcatggcagactgcctcagatcgtggtggtggacaatggcaccgagttccacagcgtgtacttcgaaaccctgctggctaccttcgagtgcaccaagaagcagcggcctccagccaaggccagatttggcagcgtgtgcgagagactgttcggcaccagcaacacccagttcgtgcacaacctgctgggcaatacccagatcacccggaacgtgcggcaagtgaccaagagcgtgaaccccaagaatcaggccgtgtggacactgggactgctgtacgagtatctgtgcgcctgggcctacgaggtgtacgacacagatgaacaccccgctctgtttcagagccccagggatgcttttgccgccggaatggtcacaagcggcagcagactgcaccggatgatcccttacgacgagaacttccagatcctgacactgcccaccaccagcgagggcaaagccaaggtgcaagttggcagaggcgtgaagatcaacagcatctactactggtccaacagcttcagggacccacagatcgagaacaccagcgtgcccaccagatacgaccccttcaacatcggaatcgcctacgccttcgtcagaggccagtgggtgcagtgcatcagccagtactacagccagctgcagggcagatccgagaaagagctgaagctggctagcgccgagctgagaaagagaagcagcaactacggcagacagagccaggtgtccgccaagaacctggccgaatttctggccagcgtcgaggcccaagagacactgctggaacagagaagctacgacgccgaggccagagaagtgttcatcgtgatcgaaggcggcaaggccgccaccagcagaaatgagcagcctaagctgatccaggtgccgtttgagaacaccgacacacaggtggccgaggacgaggccattacacctgaaacactggtggtgtacgaggaattcagcctgtgactagcaacgttactggccgaagccgcttggaataaggccggtgtgcgtttgtctatatgttattttccaccatattgccgtcttttggcaatgtgagggcccggaaacctggccctgtcttcttgacgagcattcctaggggtctttcccctctcgccaaaggaatgcaaggtctgttgaatgtcgtgaaggaagcagttcctctggaagcttcttgaagacaaacaacgtctgtagcgaccctttgcaggcagcggaaccccccacctggcgacaggtgcctctgcggccaaaagccacgtgtataagatacacctgcaaaggcggcacaaccccagtgccacgttgtgagttggatagttgtggaaagagtcaaatggctctcctcaagcgtattcaacaaggggctgaaggatgcccagaaggtaccccattgtatgggatctgatctggggcctcggtgcacatgctttacatgtgtttagtcgaggttaaaaaaacgtctaggccccccgaaccacggggacgtggttttcctttgaaaaacacgatgataatatggccacaaccatggtgagcaagggcgaggagctgttcaccggggtggtgcccatcctggtcgagctggacggcgacgtaaacggccacaagttcagcgtgtccggcgagggcgagggcgatgccacctacggcaagctgaccctgaagttcatctgcaccaccggcaagctgcccgtgccctggcccaccctcgtgaccaccctgacctacggcgtgcagtgcttcagccgctaccccgaccacatgaagcagcacgacttcttcaagtccgccatgcccgaaggctacgtccaggagcgcaccatcttcttcaaggacgacggcaactacaagacccgcgccgaggtgaagttcgagggcgacaccctggtgaaccgcatcgagctgaagggcatcgacttcaaggaggacggcaacatcctggggcacaagctggagtacaactacaacagccacaacgtctatatcatggccgacaagcagaagaacggcatcaaggtgaacttcaagatccgccacaacatcgaggacggcagcgtgcagctcgccgaccactaccagcagaacacccccatcggcgacggccccgtgctgctgcccgacaaccactacctgagcacccagtccgccctgagcaaagaccccaacgagaagcgcgatcacatggtcctgctggagttcgtgaccgccgccgggatcactctcggcatggacgagctgtacaagggcagcggcagcggcgcaaccaatttcagcctgctgaaacaggccggcgatgtggaagagaatccaggccccatgtacccctacgacgtgccagactacgcccctaagaagaagagaaaagtcggcggctctggcggcggaggatctggcggaggtggaagcggaggaacccagaccaacggcttccctctggaactgctgaccagacctgctcctgagagactggcctacttcgagaactacaccgtgggacaccccagactgaaagaggtgtccgagatcctgatgcggacaatcgctgaacctgccggcgctagcttcatcttcgtgtatggacctagcggcgtgggcaagaccacactgagactgagagtggaacagaaactgaccgagctggtgctgcccctgctggaatctgatagaggcagagtgcctgtcgtgggcgttgaagctgtggcccctgagagcagaaacttcaactggaaggactactacacacgggccctgatcgccctggaagaacctctgatcgaccacaagttcgactacggcgtgcggggcatcagcagagacaacttcggcaagatcaacgtggaaagcaaggtggtggccccagctctgagaagggccctcgaaaatgccctgatccacagacaccccgacgtgttctttgtggacgaggcccagcactttggcaagatggccagcggctacaagctgcaggatcagctggattgcctgaagtccctggccaacatgaccggcatcctgcactgtctgctgggcacatacgagctgctgaccttcagaaacctgagcggccagctgtctcggagaagcgtggacatccacttcagacggtactgcgccgagaatcccgaagatgtgcaggccttcaagagcgtgctgctgactttccagcagcagatgcctctggccgaggctcctgatctggtgtctcactgggagtacttctacgagagaaccctgggctgcgtgggcatcctgaagaactggctgacaagagccctgaaggacgccctggatagagaagccaccaccgtgacactgaaggacctgcagaaacgcgcttggagcgtggcccagtgccagcggatgttcaaagagatccaagagggcgaaagacagctgagcgagacagagacagacatccagaacctgagatctgccctcggcctgggagccaagcctattgtgctgcctgaggaaacccctaagaccaccagacctccaggcaaagtgggcaaaagaaagcccaagagggaccccatcggagtgcagcaggatgtgtcttgacctcaggtgcaggctgcctatcagaaggtggtggctggtgtggccaatgccctggctcacaaataccactgagatctttttccctctgccaaaaattatggggacatcatgaagccccttgagcatctgacttctggctaataaaggaaatttattttcattgcaatagtgtgttggaattttttgtgtctctcactcggaaggacatatgggagggcaaatcatttaaaacatcagaatgagtatttggtttagagtttggcaacatatgcccatatgctggctgccatgaacaaaggttggctataaagaggtcatcagtatatgaaacagccccctgctgtccattccttattccatagaaaagccttgacttgaggttagattttttttatattttgttttgtgttatttttttctttaacatccctaaaattttccttacatgttttactagccagatttttcctcctctcctgactactcccagtcatagctgtccctcttctcttatggagatccctcgacctgcagcccaagcttggcgtaatcatggtcatagctgtttcctgtgtgaaattgttatccgctcacaattccacacaacatacgagccggaagcataaagtgtaaagcctggggtgcctaatgagtgagctaactcacattaattgcgttgcgctcactgcccgctttccagtcgggaaacctgtcgtgccagcggatccattccacagaattaaaaaattgagcaacgcctaacggcatcaagccacgaatcacaggcgtcgcgctggcgggcattcctgaagctgacagttgagcaacgcctaacggcatcaagccacgaatcacgtcctttccacaagatatataaagccaagaaatcgaaatactttcaagttacggtaagcatatgatagtccattttaaaacataattttaaaactgcaaactacccaagaaattattactttctacgtcacgtattttgtactaatatctttgtgtttacagtcaaattaattctaattatctctctaacagccttgtatcgtatatgcaaatatgaaggaatcatgggaaataggccctccgctgcattaatgaatcggccaacgcgcggggagaggcggtttgcgtattgggcgctgttccgcttcctcgctcactgactcgctgcgctcggtcgttcggctgcggcgagcggtatcagctcactcaaaggcggtaatacggttatccacagaatcaggggataacgcaggaaagaacatgtgagcaaaaggccagcaaaaggccaggaaccgtaaaaaggccgcgttgctggcgtttttccataggctccgcccccctgacgagcatcacaaaaatcgacgctcaagtcagaggtggcgaaacccgacaggactataaagataccaggcgtttccccctggaagctccctcgtgcgctctcctgttccgaccctgccgcttaccggatacctgtccgcctttctcccttcgggaagcgtggcgctttctcatagctcacgctgtaggtatctcagttcggtgtaggtcgttcgctccaagctgggctgtgtgcacgaaccccccgttcagcccgaccgctgcgccttatccggtaactatcgtcttgagtccaacccggtaagacacgacttatcgccactggcagcagccactggtaacaggattagcagagcgaggtatgtaggcggtgctacagagttcttgaagtggtggcctaactacggctacactagaagaacagtatttggtatctgcgctctgctgaagccagttaccttcggaaaaagagttggtagctcttgatccggcaaacaaaccaccgctggtagcggtggtttttttgtttgcaagcagcagattacgcgcagaaaaaaaggatctcaagaagatcctttgatcttttctacggggtctgacgctcagtggaacgaaaactcacgttaagggattttggtcatgagattatcaaaaaggatcttcacctagatccttttaaattaaaaatgaagttttaaatcaatctaaagtatatatgagtaaacttggtctgacagttaccaatgcttaatcagtgaggcacctatctcagcgatctgtctatttcgttcatccatagttgcctgactccccgtcgtgtagataactacgatacgggagggcttaccatctggccccagtgctgcaatgataccgcgagaaccacgctcaccggctccagatttatcagcaataaaccagccagccggaagggccgagcgcagaagtggtcctgcaactttatccgcctccatccagtctattaattgttgccgggaagctagagtaagtagttcgccagttaatagtttgcgcaacgttgttgccattgctacaggcatcgtggtgtcacgctcgtcgtttggtatggcttcattcagctccggttcccaacgatcaaggcgagttacatgatcccccatgttgtgcaaaaaagcggttagctccttcggtcctccgatcgttgtcagaagtaagttggccgcagtgttatcactcatggttatggcagcactgcataattctcttactgtcatgccatccgtaagatgcttttctgtgactggtgagtactcaaccaagtcattctgagaatagtgtatgcggcgaccgagttgctcttgcccggcgtcaatacgggataataccgcgccacatagcagaactttaaaagtgctcatcattggaaaacgttcttcggggcgaaaactctcaaggatcttaccgctgttgagatccagttcgatgtaacccactcgtgcacccaactgatcttcagcatcttttactttcaccagcgtttctgggtgagcaaaaacaggaaggcaaaatgccgcaaaaaagggaataagggcgacacggaaatgttgaatactcatactcttcctttttcaatattattgaagcatttatcagggttattgtctcatgagcggatacatatttgaatgtatttagaaaaataaacaaataggggttccgcgcacatttccccgaaaagtgccacctgggtcgacattgattattgactagtaatagtaatcaattacggggtcattagttcatagcccatatatggagttccgcgttacataacttacggtaaatggcc

SEQ ID NO: 759 - DNA, 14517 bp, synthetic construct
  misc_feature 1..14517: note = Synthetic
  source 1..14517: mol_type = other DNA
cgcctggctgaccgcccaacgacccccgcccattgacgtcaataatgacgtatgttcccatagtaacgccaatagggactttccattgacgtcaatgggtggagtatttacggtaaactgcccacttggcagtacatcaagtgtatcatatgccaagtacgccccctattgacgtcaatgacggtaaatggcccgcctggcattatgcccagtacatgaccttatgggactttcctacttggcagtacatctacgtattagtcatcgctattaccatggtgatgcggttttggcagtacatcaatgggcgtggatagcggtttgactcacggggatttccaagtctccaccccattgacgtcaatgggagtttgttttggcaccaaaatcaacgggactttccaaaatgtcgtaacaactccgccccattgacgcaaatgggcggtaggcgtgtacggtgggaggtctatataagcagagctggtttagtgaaccgtcagatccgctagcgctaccggactcagatcgccaccatgcccaagaagaaacggaaagtgggctccggggccgctctgctgatccagagcgaggaatacgtggacctgaccttcaagctgagaggcgcccctattcctctggacaacggctacgtgatctacagcgccctgagcagaatctgccccatcctgcacgagctggacaacatcggcattcaccctatcgccggcattcccaccagaaacaacctgctggaactgacagcccagagccggctgaaagtgcggattcaccaccagcagatccctctgatctacccctatctggccggacagaccttccacatcggccagaatagctaccagctggacatccccgactacaagcccctgatcagcagcgagagcgtgtacagcagactggtcatcatcaccggcttccaagagcctaccaacttcatcgaggccgtgcagcggaagctggataacaagggcatccagggcaagatcgagctgctgaccagacaggatggcacccctcagaagagacagctgaccatcaacaagcagggcaagcagttcaaagtgcgcggctttggcgtgcggatcagcgagctgaatcctgaggatagcctgacactgcaagagcagggcatctccggcaagcggaagatgatgtgcggcatcttcgtgcccgccaccagatccaaagaggaagaggaaaccggctccgggtccggggggtccggggccacaaacttttccctgctgaagcaggctggcgacgtggaggaaaaccccggacctatgcctaagaagaaaagaaaagtgggcagcggagtggccacacagcccaagatcagcctgtctctggatgccgccgacaccaccatcatgcacagagttggaatggccggcctgtacatgaccctgaagcggctggaaaagcagtaccccagcagcagacagagaggcggccacatttcttggagcctgaccgccgataccatcgagctgttttggcagggcagcgactttgtggccctgagctggctgatcaaagagagctttcagctggacgacaccggcctgatccacctgacaggcctggacaacgacgccatcaacctgagccagaagatccacatccacgagggaatctgcgccgtgttcctgcggctgaacaagttttaccaggccggcgagatcgtgaacaccgagctgacagtggaagagaagaaggtggaataccagtacaagagcctgacttggtacgcccaccaggcctttgccgagaagctgtgcgaagccgatacacagcagctgcggcacgactacgtgcagatcacaagctggctgtacctcggcggaattgtgcggcatgccagaacacagaacaccaccaagctggaagaaaagcccgagtacgccctggctctgctgtttgtgcctgtcgtgtgccactactgcctgctgcacatccctagcgaggacctgaaagagaaaaagccccacagatacctggtggtcatccccgagatcaaggacttcgaggatgccagccagagaagatggcggctgcagcagctggaaacaaagcagctgcacgtgtccagcctgggagaagccggcctgctgtactacagcctggacgatattcagcccgagggcgactactaccaggcctgccaagtttggctgtacgagaagatgaaccaggccagccggcagagaaccctgatgagcatcgaggaaatcgagatcgacaagaacaccctgatcacctaccagcaggtccagaagtactttcagcccaactatcagaagatcgagtacaagcagatcttcatcaaagtgaaccccattcggtccctgatcgccgacaatctggtcaccggaatccactggtggtccaacttttgggagaaactggtcatcgaggacagcaaagagtacctgttcaaccagatcttccccaaccgcgagggcttcatcagaatggccgagaacagcgaagaggacaagcactacctgatctttatcaaggtgttccagcaggccatgaagggcaacttcgccaagatgtacgccaaggccgaggacggcaaggaccctcctatcaagaaaaaagtggaacggctgcgggccgagctgaactactgttacgatgagctgagcttcaaagagtatctgagcgacttcctcgtcagaggtggcctgaacaaatacctgaaccagaatcaggccgagatcctgctgctgatcaagaagctgccctggcaagagctgagaatctgggccctgctggccattgccagctacaagcccaaagagaagcccatcagcaaggacgacagcctgacactgaacaaccagcagctcgaagagatgaacgacgagagcgaggaagaggggagcggctctggaggctctggagccacaaatttctctctgctgaaacaggctggggatgtggaggaaaatcctggacccatgcccaagaagaagaggaaggtgggatccggcatgagccagaagaagaacgacaacaacatccccaactactacctgtacggcaccgtgctgaccagatacggactggccagcctgaaccacgacatgcggagaggcaacaagaccacactgcagaaaggctactggaacggcaagatccacagcttcgtgggcagcagcgccattagatgggccctgaggttctatctgcagaaacagggctacctggtcaacagagtgtgggacgaagatgagcacatcaaccggctgaccaacgaggacttcgaccccgagcagttctacgacgacgacatcttcggcttcgccctgctggaaagcgccgagatcgaggaagagacaagcaccaccaagcggaagaagaagcagaccaagaccagcacaccccaccagagaatgggagccctggccatgaatatggccgtgtctctgaccccttacgatggcgccgtgaagctgggagccaagtctggcagagagaaggacagcaccagcctgcacttcaccgagtaccacgccaccagataccagtactacttcggcatcaacgccacacacctgaaggacttcagccggatcctgcctgtgatcgacggcatcatgaacctgcctaaagtcggcggcaacagcaatatcttcaactaccctttctgccccgacagcctggtgctgcagtggaccaacaatttcgccagctacatcagctactgcttcgagtactgcgaccctcagagcaaagaggccaagttcacccaagagttcatcgacgaggtggaatgcggccagatcgagccttctcagctctggatcggcggcaccatcgtgaaggatctgcagcagctggacaacttcgacgacagccccttcaagaaggcccacatctaccggaaccggaacgagctgatcgagaacctgaaaaccgtgatcacccggaacctgggcctcgaggaatccaagggctctggaagcggcggaagcggcgctaccaactttagcctgctgaagcaggccggcgacgtggaggaaaacccagggcccatgcccaaaaagaagcggaaagtgggctccgggacagcccctctgatcctgtacctggatgtgcccttcgccaccttcagagagtctcacgccagagagatgggcaagacataccccgttcctccaccagccacagtgtacggcatgctgctgtctctcgtgggcgagacagacgtgtacagacactgcggagtggaactggccattgccatgctgagcatccccaagaagtcccggatcctgcggcagatgcggagattcaagaacgccgacttctctcaccccgagaacgtgatcccttgctaccaagagatcctgagcaacctgaagtgcctgatctgggtccgaagcgagggcgagaagatccagcctagcctgagagagagaatccagctggccctggatcaccctgaactcgtcagaagattcggctgcctgttcctgggcgagagcgaccagctgatcaagagcatcaagctggtgtcccaggactacctgcagggcgtcagacagtgggtcatcagagacaacagaggctggctgaccctgccttactgggttgaccacgtgggcagcagaaatacccggttcctgagataccggatcgaggaaatccctagcagccctcctcctgacctggcctggacaatgattcagagccccatcggaagcgggtccggagggtccggagccactaatttctccctgctgaaacaggcaggcgatgtggaagagaatcccgggcctatgcccaaaaagaaaaggaaggtgggatccggcgtcaaccccagaggcatgaccatctacctggaacactggaacctgaagcctctggaaatccctcagcggagccggctgtttagcctggaaccagtggctgtgggcacaccttatgccgagagcctgagcagctacctgcacagactggcccaggctcactgtctgaccagccagaaactggtcatgggcgagatcgcccctctgatcctgaaggacgaggacaagagcgagctgctgagcaagaacctgagccatctgctgggcaacagcgacgccaagcctaccatcaacggcatgagagagatgaccggcaagctggtcaccatcctggaagaactgaccatgcggcaggacctgcggtttctgacactgctgtcttggaagggcatgatctacgacaagggcctgttccgcaactacagagcctggtgtccttgctgctgggaagagtggatgcgcgagaacaagacaatctacgagcccctgctgtggtccttcaaggacgtggaattctgcgtgatccacaagcagcggctgatcgaggaatgccctcactgtggcagcagactgcccatcatggccaagtttagccctgccggcttctgcagcagatgctatggatggctgggccaagaagtgaagggcgaagaggaaatcgagaagtaccgcgtgaacatccagggcatctccgagctgattgccctgacacctcagctgggctacgagcctattcctatcgagctgacccggaaactgcagctgatcctgctggtgttcgagcaggccatcggcaaggatctgaacctgctgggcgatctgggcagaatcatggaaagcctgcggatcgccagcaagaccaaccagaaccagccttaccacctggtcaagctgatcatccccgtgtgcgagaaggccaagatcagcgtgtcccagctgttcggcctggactttcaagagctgggcaagatcctgttcggcaatttctccctggaactgaaactgggatccggaagcgggggaagcggggccactaacttttctctgctgaagcaggcaggggacgtggaagagaaccctggccccatgtacccctacgacgtgccagactacgcccctaagaagaagagaaaagtcggcggctctggcggcggaggatctggcggaggtggaagcggaggaaaggaacagttcgagcagtgggtcgcccggctgcagatttctgaagccggccagaaaatcatcgagaaagtgcggagcagcgagcccagcagaagagttggcggcggaagcaaaaatgtggccggcagataccccagccggaagatgggagtgaccatccagttcgagagccacagagtggaactgcccgtgatctaccagctggaacacgacgaggacgtgctggaattctacgaccagcctcctcagatcaagctggactaccaggccagcaatggcagacgactgggagtgctgcacacccctgatctgttcgtgatcaggaccaatagcgccggctgggaagagtgcaagaccgagcaggatctgaagaagctggcccagaagaaccccaaccggtacttctacagccaagaggacaaccagtggcactgccctccaggcgaagtgtacgccgatcagttcggcctgtactaccggatcagaagcgacaaagaaatcaactgggtgctgcagcggaacctgcagttcctggaagattactaccgcagcgagagcctgggcgtcgaacaggctattgctcagtctctgctggccatcgtgtctagccagcctggaattacactggccgagctgctgcatcagcagacaggcgccaagagcgacgacatctacaccctgatcgtgcaagagcagatctacttcgacctgaacgccgctcctctggctgagcctgagagatgcctgatcttcagggatgagcagaccgccagcgcctacagactgatggtggaacagcccaacgtgtccctgcctgccatctctcccgtgatcaatatcgccaccggcacacccgtgtcctgggatggaaagggcctgaacatcatcctcgtgggcgagacagaagtgatcctgggcgccgagaatgaccagctgatcaagttcaagaaaaacgtgttcgaggaactcgtgcggcagggcgagatcacatctctgcagaccccagagaaaaccgacatcagcaccgagagctggcagcggttttaccaggcctctccagaggatcaggccgaggctctggaacggtacaagaccatcgagccctacctgaacggacaccctcctgagaacgagacaatccccgccagaaccatcagagactggaaggccaagtacctgacagccctgcagaagtacggctgcggctatatcggcctgctgtcccacagaagcgtgaagggcaacagacagagaaagctgcccgaggacaccctggccatcatggaaagattcattctcgaggactacgagacactgaagcagaaacggatgctggaagtgtatggcgccctggtgctggcttgtgaacagagcagtgtgatcgcccctagctacaaggccttcaccaaagaagtgaagcggcggaccggctacgagcagaccaagaagagacaaggcagaagggccgcctaccagtacgagagcttttactgggagctgacccagaaaacaccccggcacggcgatagacctttcgagatcggacacatcgatcacacccagctggacgtggaacttgtgtgctccagaaccggcagaaacctgggcagaccttgggccacctttctggtggatgcctactctagaaggctgctggccgtgtacctgaccttcgacagcccaagctaccggtcctgtctgatggtgctgcggatctgcgtgaagaggcatggcagactgcctcagatcgtggtggtggacaatggcaccgagttccacagcgtgtacttcgaaaccctgctggctaccttcgagtgcaccaagaagcagcggcctccagccaaggccagatttggcagcgtgtgcgagagactgttcggcaccagcaacacccagttcgtgcacaacctgctgggcaatacccagatcacccggaacgtgcggcaagtgaccaagagcgtgaaccccaagaatcaggccgtgtggacactgggactgctgtacgagtatctgtgcgcctgggcctacgaggtgtacgacacagatgaacaccccgctctgtttcagagccccagggatgcttttgccgccggaatggtcacaagcggcagcagactgcaccggatgatcccttacgacgagaacttccagatcctgacactgcccaccaccagcgagggcaaagccaaggtgcaagttggcagaggcgtgaagatcaacagcatctactactggtccaacagcttcagggacccacagatcgagaacaccagcgtgcccaccagatacgaccccttcaacatcggaatcgcctacgccttcgtcagaggccagtgggtgcagtgcatcagccagtactacagccagctgcagggcagatccgagaaagagctgaagctggctagcgccgagctgagaaagagaagcagcaactacggcagacagagccaggtgtccgccaagaacctggccgaatttctggccagcgtcgaggcccaagagacactgctggaacagagaagctacgacgccgaggccagagaagtgttcatcgtgatcgaaggcggcaaggccgccaccagcagaaatgagcagcctaagctgatccaggtgccgtttgagaacaccgacacacaggtggccgaggacgaggccattacacctgaaacactggtggtgtacgaggaattcagcctgtgactagcaacgttactggccgaagccgcttggaataaggccggtgtgcgtttgtctatatgttattttccaccatattgccgtcttttggcaatgtgagggcccggaaacctggccctgtcttcttgacgagcattcctaggggtctttcccctctcgccaaaggaatgcaaggtctgttgaatgtcgtgaaggaagcagttcctctggaagcttcttgaagacaaacaacgtctgtagcgaccctttgcaggcagcggaaccccccacctggcgacaggtgcctctgcggccaaaagccacgtgtataagatacacctgcaaaggcggcacaaccccagtgccacgttgtgagttggatagttgtggaaagagtcaaatggctctcctcaagcgtattcaacaaggggctgaaggatgcccagaaggtaccccattgtatgggatctgatctggggcctcggtgcacatgctttacatgtgtttagtcgaggttaaaaaaacgtctaggccccccgaaccacggggacgtggttttcctttgaaaaacacgatgataatatggccacaaccatggtgagcaagggcgaggagctgttcaccggggtggtgcccatcctggtcgagctggacggcgacgtaaacggccacaagttcagcgtgtccggcgagggcgagggcgatgccacctacggcaagctgaccctgaagttcatctgcaccaccggcaagctgcccgtgccctggcccaccctcgtgaccaccctgacctacggcgtgcagtgcttcagccgctaccccgaccacatgaagcagcacgacttcttcaagtccgccatgcccgaaggctacgtccaggagcgcaccatcttcttcaaggacgacggcaactacaagacccgcgccgaggtgaagttcgagggcgacaccctggtgaaccgcatcgagctgaagggcatcgacttcaaggaggacggcaacatcctggggcacaagctggagtacaactacaacagccacaacgtctatatcatggccgacaagcagaagaacggcatcaaggtgaacttcaagatccgccacaacatcgaggacggcagcgtgcagctcgccgaccactaccagcagaacacccccatcggcgacggccccgtgctgctgcccgacaaccactacctgagcacccagtccgccctgagcaaagaccccaacgagaagcgcgatcacatggtcctgctggagttcgtgaccgccgccgggatcactctcggcatggacgagctgtacaagggcagcggcagcggcgcaaccaatttcagcctgctgaaacaggccggcgatgtggaagagaatccaggccccatgtacccctacgacgtgccagactacgcccctaagaagaagagaaaagtcggcggctctggcggcggaggatctggcggaggtggaagcggaggaacccagaccaacggcttccctctggaactgctgaccagacctgctcctgagagactggcctacttcgagaactacaccgtgggacaccccagactgaaagaggtgtccgagatcctgatgcggacaatcgctgaacctgccggcgctagcttcatcttcgtgtatggacctagcggcgtgggcaagaccacactgagactgagagtggaacagaaactgaccgagctggtgctgcccctgctggaatctgatagaggcagagtgcctgtcgtgggcgttgaagctgtggcccctgagagcagaaacttcaactggaaggactactacacacgggccctgatcgccctggaagaacctctgatcgaccacaagttcgactacggcgtgcggggcatcagcagagacaacttcggcaagatcaacgtggaaagcaaggtggtggccccagctctgagaagggccctcgaaaatgccctgatccacagacaccccgacgtgttctttgtggacgaggcccagcactttggcaagatggccagcggctacaagctgcaggatcagctggattgcctgaagtccctggccaacatgaccggcatcctgcactgtctgctgggcacatacgagctgctgaccttcagaaacctgagcggccagctgtctcggagaagcgtggacatccacttcagacggtactgcgccgagaatcccgaagatgtgcaggccttcaagagcgtgctgctgactttccagcagcagatgcctctggccgaggctcctgatctggtgtctcactgggagtacttctacgagagaaccctgggctgcgtgggcatcctgaagaactggctgacaagagccctgaaggacgccctggatagagaagccaccaccgtgacactgaaggacctgcagaaacgcgcttggagcgtggcccagtgccagcggatgttcaaagagatccaagagggcgaaagacagctgagcgagacagagacagacatccagaacctgagatctgccctcggcctgggagccaagcctattgtgctgcctgaggaaacccctaagaccaccagacctccaggcaaagtgggcaaaagaaagcccaagagggaccccatcggagtgcagcaggatgtgtcttgacctcaggtgcaggctgcctatcagaaggtggtggctggtgtggccaatgccctggctcacaaataccactgagatctttttccctctgccaaaaattatggggacatcatgaagccccttgagcatctgacttctggctaataaaggaaatttattttcattgcaatagtgtgttggaattttttgtgtctctcactcggaaggacatatgggagggcaaatcatttaaaacatcagaatgagtatttggtttagagtttggcaacatatgcccatatgctggctgccatgaacaaaggttggctataaagaggtcatcagtatatgaaacagccccctgctgtccattccttattccatagaaaagccttgacttgaggttagattttttttatattttgttttgtgttatttttttctttaacatccctaaaattttccttacatgttttactagccagatttttcctcctctcctgactactcccagtcatagctgtccctcttctcttatggagatccctcgacctgcagcccaagcttggcgtaatcatggtcatagctgtttcctgtgtgaaattgttatccgctcacaattccacacaacatacgagccggaagcataaagtgtaaagcctggggtgcctaatgagtgagctaactcacattaattgcgttgcgctcactgcccgctttccagtcgggaaacctgtcgtgccagcggatccattccacagaattaaaaaattgagcaacgcctaacggcatcaagccacgaatcacaggcgtcgcgctggcgggcattcctgaagctgacagttgagcaacgcctaacggcatcaagccacgaatcacgtcctttccacaagatatataaagccaagaaatcgaaatactttcaagttacggtaagcatatgatagtccattttaaaacataattttaaaactgcaaactacccaagaaattattactttctacgtcacgtattttgtactaatatctttgtgtttacagtcaaattaattctaattatctctctaacagccttgtatcgtatatgcaaatatgaaggaatcatgggaaataggccctccgctgcattaatgaatcggccaacgcgcggggagaggcggtttgcgtattgggcgctgttccgcttcctcgctcactgactcgctgcgctcggtcgttcggctgcggcgagcggtatcagctcactcaaaggcggtaatacggttatccacagaatcaggggataacgcaggaaagaacatgtgagcaaaaggccagcaaaaggccaggaaccgtaaaaaggccgcgttgctggcgtttttccataggctccgcccccctgacgagcatcacaaaaatcgacgctcaagtcagaggtggcgaaacccgacaggactataaagataccaggcgtttccccctggaagctccctcgtgcgctctcctgttccgaccctgccgcttaccggatacctgtccgcctttctcccttcgggaagcgtggcgctttctcatagctcacgctgtaggtatctcagttcggtgtaggtcgttcgctccaagctgggctgtgtgcacgaaccccccgttcagcccgaccgctgcgccttatccggtaactatcgtcttgagtccaacccggtaagacacgacttatcgccactggcagcagccactggtaacaggattagcagagcgaggtatgtaggcggtgctacagagttcttgaagtggtggcctaactacggctacactagaagaacagtatttggtatctgcgctctgctgaagccagttaccttcggaaaaagagttggtagctcttgatccggcaaacaaaccaccgctggtagcggtggtttttttgtttgcaagcagcagattacgcgcagaaaaaaaggatctcaagaagatcctttgatcttttctacggggtctgacgctcagtggaacgaaaactcacgttaagggattttggtcatgagattatcaaaaaggatcttcacctagatccttttaaattaaaaatgaagttttaaatcaatctaaagtatatatgagtaaacttggtctgacagttaccaatgcttaatcagtgaggcacctatctcagcgatctgtctatttcgttcatccatagttgcctgactccccgtcgtgtagataactacgatacgggagggcttaccatctggccccagtgctgcaatgataccgcgagaaccacgctcaccggctccagatttatcagcaataaaccagccagccggaagggccgagcgcagaagtggtcctgcaactttatccgcctccatccagtctattaattgttgccgggaagctagagtaagtagttcgccagttaatagtttgcgcaacgttgttgccattgctacaggcatcgtggtgtcacgctcgtcgtttggtatggcttcattcagctccggttcccaacgatcaaggcgagttacatgatcccccatgttgtgcaaaaaagcggttagctccttcggtcctccgatcgttgtcagaagtaagttggccgcagtgttatcactcatggttatggcagcactgcataattctcttactgtcatgccatccgtaagatgcttttctgtgactggtgagtactcaaccaagtcattctgagaatagtgtatgcggcgaccgagttgctcttgcccggcgtcaatacgggataataccgcgccacatagcagaactttaaaagtgctcatcattggaaaacgttcttcggggcgaaaactctcaaggatcttaccgctgttgagatccagttcgatgtaacccactcgtgcacccaactgatcttcagcatcttttactttcaccagcgtttctgggtgagcaaaaacaggaaggcaaaatgccgcaaaaaagggaataagggcgacacggaaatgttgaatactcatactcttcctttttcaatattattgaagcatttatcagggttattgtctcatgagcggatacatatttgaatgtatttagaaaaataaacaaataggggttccgcgcacatttccccgaaaagtgccacctgggtcgacattgattattgactagtaatagtaatcaattacggggtcattagttcatagcccatatatggagttccgcgttacataacttacggtaaatggcc

SEQ ID NO: 760 - DNA, 36 bp, synthetic construct
  misc_feature 1..36: note = Synthetic
  source 1..36: mol_type = other DNA
tcctccccattggcctgcttcgtggcaatgcgccac

SEQ ID NO: 761 - DNA, 36 bp, synthetic construct
  misc_feature 1..36: note = Synthetic
  source 1..36: mol_type = other DNA
tcacctccaatgactagggtgggcaaccacaaaccc

SEQ ID NO: 762 - DNA, 36 bp, synthetic construct
  misc_feature 1..36: note = Synthetic
  source 1..36: mol_type = other DNA
gggaggacatcgatgtcacctccaatgactagggtg

SEQ ID NO: 763 - DNA, 36 bp, synthetic construct
  misc_feature 1..36: note = Synthetic
  source 1..36: mol_type = other DNA
tgatgggagcccttcttcttctgctcggactcaggc

SEQ ID NO: 764 - DNA, 36 bp, synthetic construct
  misc_feature 1..36: note = Synthetic
  source 1..36: mol_type = other DNA
ggagcccttcttcttctgctcggactcaggcccttc

SEQ ID NO: 765 - DNA, 36 bp, synthetic construct
  misc_feature 1..36: note = Synthetic
  source 1..36: mol_type = other DNA
cgccaccggttgatgtgatgggagcccttcttcttc

SEQ ID NO: 766 - DNA, 36 bp, synthetic construct
  misc_feature 1..36: note = Synthetic
  source 1..36: mol_type = other DNA
actagggtgggcaaccacaaacccacgagggcagag

SEQ ID NO: 767 - DNA, 36 bp, synthetic construct
  misc_feature 1..36: note = Synthetic
  source 1..36: mol_type = other DNA
agaaactcaggaggcccccagagcagccactggggc

SEQ ID NO: 768 - DNA, 36 bp, synthetic construct
  misc_feature 1..36: note = Synthetic
  source 1..36: mol_type = other DNA
ggaagactgaggctacatagggttaggggccccagg

SEQ ID NO: 769 - DNA, 36 bp, synthetic construct
  misc_feature 1..36: note = Synthetic
  source 1..36: mol_type = other DNA
tagcctcagtcttcccatcaggctctcagctcagcc

SEQ ID NO: 770 - DNA, 36 bp, synthetic construct
  misc_feature 1..36: note = Synthetic
  source 1..36: mol_type = other DNA
ggagcagctggtcagaggggaccccggcctggggcc

SEQ ID NO: 771 - DNA, 36 bp, synthetic construct
  misc_feature 1..36: note = Synthetic
  source 1..36: mol_type = other DNA
ttagacccatgggagcagctggtcagaggggacccc

SEQ ID NO: 772 - DNA, 36 bp, synthetic construct
  misc_feature 1..36: note = Synthetic
  source 1..36: mol_type = other DNA
ttaacagctgacccaataagtggcagagtgctaagg

SEQ ID NO: 773 - DNA, 36 bp, synthetic construct
  misc_feature 1..36: note = Synthetic
  source 1..36: mol_type = other DNA
tttcctgatggtccatgtctgttactcgcctgtcaa

SEQ ID NO: 774 - DNA, 36 bp, synthetic construct
  misc_feature 1..36: note = Synthetic
  source 1..36: mol_type = other DNA
gtccatgtctgttactcgcctgtcaagtggcgtgac

SEQ ID NO: 775 - DNA, 36 bp, synthetic construct
  misc_feature 1..36: note = Synthetic
  source 1..36: mol_type = other DNA
gaccatcaggaaacattaacgtactgatgttaacag

SEQ ID NO: 776 - DNA, 36 bp, synthetic construct
  misc_feature 1..36: note = Synthetic
  source 1..36: mol_type = other DNA
tctgttactcgcctgtcaagtggcgtgacaccgggc

SEQ ID NO: 777 - DNA, 36 bp, synthetic construct
  misc_feature 1..36: note = Synthetic
  source 1..36: mol_type = other DNA
ttggggattcctggtgccagaaacaggggtgacggg

SEQ ID NO: 778 - DNA, 36 bp, synthetic construct
  misc_feature 1..36: note = Synthetic
  source 1..36: mol_type = other DNA
cactgatgttgtgtttttaacatgtcaatctgtccg

SEQ ID NO: 779 - DNA, 36 bp, synthetic construct
  misc_feature 1..36: note = Synthetic
  source 1..36: mol_type = other DNA
ttgtgtttttaacatgtcaatctgtccgttcacatg

SEQ ID NO: 780 - DNA, 36 bp, synthetic construct
  misc_feature 1..36: note = Synthetic
  source 1..36: mol_type = other DNA
ttaaaaacacaacatcagtgcatgttggggattcct

SEQ ID NO: 781 - DNA, 36 bp, synthetic construct
  misc_feature 1..36: note = Synthetic
  source 1..36: mol_type = other DNA
tcaatctgtccgttcacatgtgtggtacatggtgtt

SEQ ID NO: 782 - DNA, 36 bp, synthetic construct
  misc_feature 1..36: note = Synthetic
  source 1..36: mol_type = other DNA
tgtggtacatggtgtttgtggccttggctgacatga

SEQ ID NO: 783 - DNA, 36 bp, synthetic construct
  misc_feature 1..36: note = Synthetic
  source 1..36: mol_type = other DNA
atttagtgatcaaattgtgcagtactttgtgcattc

SEQ ID NO: 784 - DNA, 36 bp, synthetic construct
  misc_feature 1..36: note = Synthetic
  source 1..36: mol_type = other DNA
cagccactggaacgctctttccagtcgtttctcctc

SEQ ID NO: 785 - DNA, 36 bp, synthetic construct
  misc_feature 1..36: note = Synthetic
  source 1..36: mol_type = other DNA
taactcgctccaagacatccccgcttccccaaggaa

SEQ ID NO: 786 - DNA, 36 bp, synthetic construct
  misc_feature 1..36: note = Synthetic
  source 1..36: mol_type = other DNA
ggaagccacccgggagagtgaggaaatgaaacttgg

SEQ ID NO: 787 - DNA, 36 bp, synthetic construct
  misc_feature 1..36: note = Synthetic
  source 1..36: mol_type = other DNA
gtttgtatttaggcaggcgtgggaaaattaagtttt

SEQ ID NO: 788 - DNA, 36 bp, synthetic construct
  misc_feature 1..36: note = Synthetic
  source 1..36: mol_type = other DNA
aagtcactatgggaaaagatggggaggagagttgta

SEQ ID NO: 789 - DNA, 36 bp, synthetic construct
  misc_feature 1..36: note = Synthetic
  source 1..36: mol_type = other DNA
ctaatttcaataaaatcttcctgcccaccatctact

SEQ ID NO: 790 - DNA, 36 bp, synthetic construct
  misc_feature 1..36: note = Synthetic
  source 1..36: mol_type = other DNA
cttctcagtttcttctggtaacccatgaccaggatg

SEQ ID NO: 791 - DNA, 36 bp, synthetic construct
  misc_feature 1..36: note = Synthetic
  source 1..36: mol_type = other DNA
tcatctacacagtcaacctctacagcagtgtcctca

SEQ ID NO: 792 - DNA, 36 bp, synthetic construct
  misc_feature 1..36: note = Synthetic
  source 1..36: mol_type = other DNA
aagtcgggaatagtcagcaggagggcagggatccag

SEQ ID NO: 793 - DNA, 36 bp, synthetic construct
  misc_feature 1..36: note = Synthetic
  source 1..36: mol_type = other DNA
acagatatatctgtgaccgcttctaccccaatgact

SEQ ID NO: 794 - DNA, 36 bp, synthetic construct
  misc_feature 1..36: note = Synthetic
  source 1..36: mol_type = other DNA
atgtgctgaaactggaacacaaccacccacaagtca

SEQ ID NO: 795 - DNA, 36 bp, synthetic construct
  misc_feature 1..36: note = Synthetic
  source 1..36: mol_type = other DNA
ttcttacgtttgcaaacagcgtgcaagccgccgcgc

SEQ ID NO: 796 - DNA, 36 bp, synthetic construct
  misc_feature 1..36: note = Synthetic
  source 1..36: mol_type = other DNA
gggcttttctgtcaccaatcctgtccctagtggccc

SEQ ID NO: 797 - DNA, 36 bp, synthetic construct
  misc_feature 1..36: note = Synthetic
  source 1..36: mol_type = other DNA
tggctctggttctgggtacttttatctgtcccctcc

SEQ ID NO: 798 - DNA, 36 bp, synthetic construct
  misc_feature 1..36: note = Synthetic
  source 1..36: mol_type = other DNA
gctccaggaaatgggggtgtgtcaccagataaggaa

SEQ ID NO: 799 - DNA, 36 bp, synthetic construct
  misc_feature 1..36: note = Synthetic
  source 1..36: mol_type = other DNA
ggggtgtgtcaccagataaggaatctgcctaacagg

SEQ ID NO: 800 - DNA, 36 bp, synthetic construct
  misc_feature 1..36: note = Synthetic
  source 1..36: mol_type = other DNA
tttgctgcctccagggatcctgtgtccccgagctgg

SEQ ID NO: 801 - DNA, 36 bp, synthetic construct
  misc_feature 1..36: note = Synthetic
  source 1..36: mol_type = other DNA
tccacttcaggacagcatgtttgctgcctccaggga

SEQ ID NO: 802 - DNA, 36 bp, synthetic construct
  misc_feature 1..36: note = Synthetic
  source 1..36: mol_type = other DNA
tgacagttcctgcccagttccctcctgtggtagcca

SEQ ID NO: 803 - DNA, 36 bp, synthetic construct
  misc_feature 1..36: note = Synthetic
  source 1..36: mol_type = other DNA
ccctcactcgcttccccaccaatcctgcccacttct

SEQ ID NO: 804 - DNA, 36 bp, synthetic construct
  misc_feature 1..36: note = Synthetic
  source 1..36: mol_type = other DNA
gattgtagaagtgggcaggattggtggggaagcgag

SEQ ID NO: 805 - DNA, 36 bp, synthetic construct
  misc_feature 1..36: note = Synthetic
  source 1..36: mol_type = other DNA
acagcaccagccctgtatccacacccatcacatcaa

SEQ ID NO: 806 - DNA, 36 bp, synthetic construct
  misc_feature 1..36: note = Synthetic
  source 1..36: mol_type = other DNA
actgacatctacctgctcaacctggccatctctgac

SEQ ID NO: 807 - DNA, 36 bp, synthetic construct
  misc_feature 1..36: note = Synthetic
  source 1..36: mol_type = other DNA
tcagtcatgctcttcagccttttgcagtttatcagg

SEQ ID NO: 808 - DNA, 36 bp, synthetic construct
  misc_feature 1..36: note = Synthetic
  source 1..36: mol_type = other DNA
aatagccccgggatttccaaattccgtcggatcggg

SEQ ID NO: 809 - DNA, 36 bp, synthetic construct
  misc_feature 1..36: note = Synthetic
  source 1..36: mol_type = other DNA
ggaggcggaggtcgggatcgctgggagtcgggaatg

SEQ ID NO: 810 - DNA, 36 bp, synthetic construct
  misc_feature 1..36: note = Synthetic
  source 1..36: mol_type = other DNA
cggaaggatcccacaatcactctcagaatgttctct

SEQ ID NO: 811 - DNA, 36 bp, synthetic construct
  misc_feature 1..36: note = Synthetic
  source 1..36: mol_type = other DNA
tgactagagagggtccattttgaggatgggggtgtc

SEQ ID NO: 812 - DNA, 36 bp, synthetic construct
  misc_feature 1..36: note = Synthetic
  source 1..36: mol_type = other DNA
tgggaatcatttcttgtatttagtagactattctgg

SEQ ID NO: 813 - DNA, 36 bp, synthetic construct
  misc_feature 1..36: note = Synthetic
  source 1..36: mol_type = other DNA
agtctattgaggtaatccatagaaatcccttaaccc

SEQ ID NO: 814 - DNA, 36 bp, synthetic construct
  misc_feature 1..36: note = Synthetic
  source 1..36: mol_type = other DNA
gctgaggcagtaagccggtaggagtcagacccttat

SEQ ID NO: 815 - DNA, 36 bp, synthetic construct
  misc_feature 1..36: note = Synthetic
  source 1..36: mol_type = other DNA
ccccagcggcttctgaccccgtccttcccccttgcc

SEQ ID NO: 816 - DNA, 36 bp, synthetic construct
  misc_feature 1..36: note = Synthetic
  source 1..36: mol_type = other DNA
cttataaagtagcagggatctctcacatgtgattta

SEQ ID NO: 817 - DNA, 36 bp, synthetic construct
  misc_feature 1..36: note = Synthetic
  source 1..36: mol_type = other DNA
gtgaaaccccgtctctactaaaaatacaaaaattat

SEQ ID NO: 818 - DNA, 36 bp, synthetic construct
  misc_feature 1..36: note = Synthetic
  source 1..36: mol_type = other DNA
ctctgtgattagcagacacggatggctgattctttt

SEQ ID NO: 819 - DNA, 36 bp, synthetic construct
  misc_feature 1..36: note = Synthetic
  source 1..36: mol_type = other DNA
ctaggatacttaaaagaaataatacctgtgaagagc

SEQ ID NO: 820 - DNA, 36 bp, synthetic construct
  misc_feature 1..36: note = Synthetic
  source 1..36: mol_type = other DNA
gagagggcagggcgcttgggagcagggcgcgaggcc

SEQ ID NO: 821 - DNA, 36 bp, synthetic construct
  misc_feature 1..36: note = Synthetic
  source 1..36: mol_type = other DNA
ggggccttttggaacccagcagggctgggctggggc

SEQ ID NO: 822 - DNA, 36 bp, synthetic construct
  misc_feature 1..36: note = Synthetic
  source 1..36: mol_type = other DNA
caaactgtatcccgagcccggctcccaaagctcctc

SEQ ID NO: 823 - DNA, 36 bp, synthetic construct
  misc_feature 1..36: note = Synthetic
  source 1..36: mol_type = other DNA
tctggtaatggttatctattattggctctggctttg

SEQ ID NO: 824 - DNA, 36 bp, synthetic construct
  misc_feature 1..36: note = Synthetic
  source 1..36: mol_type = other DNA
gttatctattattggctctggctttgtcttctctct

SEQ ID NO: 825 - DNA, 36 bp, synthetic construct
  misc_feature 1..36: note = Synthetic
  source 1..36: mol_type = other DNA
acacaaattccagggttttttctagtgctgagtttc

SEQ ID NO: 826 - DNA, 36 bp, synthetic construct
  misc_feature 1..36: note = Synthetic
  source 1..36: mol_type = other DNA
tagaggagtcacagaaactcagcactagaaaaaacc

SEQ ID NO: 827 - DNA, 36 bp, synthetic construct
  misc_feature 1..36: note = Synthetic
  source 1..36: mol_type = other DNA
ataggcaggggttgtgtggtgagctctgagaatgtg

SEQ ID NO: 828 - DNA, 36 bp, synthetic construct
  misc_feature 1..36: note = Synthetic
  source 1..36: mol_type = other DNA
tccctgcctctagagagatgcctacttgaccccagt

SEQ ID NO: 829 - DNA, 36 bp, synthetic construct
  misc_feature 1..36: note = Synthetic
  source 1..36: mol_type = other DNA
gagaaaatattcagaatcacctttcacttgggtgcc

SEQ ID NO: 830 - DNA, 36 bp, synthetic construct
  misc_feature 1..36: note = Synthetic
  source 1..36: mol_type = other DNA
gcgacttcaggcacaggataggccagaggcagcttc

SEQ ID NO: 831 - DNA, 36 bp, synthetic construct
  misc_feature 1..36: note = Synthetic
  source 1..36: mol_type = other DNA
ctgcccttgactagcaacactggctcaaagaaggaa

SEQ ID NO: 832 - DNA, 36 bp, synthetic construct
  misc_feature 1..36: note = Synthetic
  source 1..36: mol_type = other DNA
cccatgccttgctctctttctgtcctcagtggtccc

SEQ ID NO: 833 - DNA, 36 bp, synthetic construct
  misc_feature 1..36: note = Synthetic
  source 1..36: mol_type = other DNA
gcagaaggaggagggcagaatcatcacgaaggtgag

SEQ ID NO: 834 - DNA, 36 bp, synthetic construct
  misc_feature 1..36: note = Synthetic
  source 1..36: mol_type = other DNA
gggttccctgtcctctcaggggatgggtggatggcc

SEQ ID NO: 835 - DNA, 36 bp, synthetic construct
  misc_feature 1..36: note = Synthetic
  source 1..36: mol_type = other DNA
attctgccctcctccttctgccatgggtgcagcctg

SEQ ID NO: 836 - DNA, 36 bp, synthetic construct
  misc_feature 1..36: note = Synthetic
  source 1..36: mol_type = other DNA
ggtgcagcctgggaccactgaggacagaaagagagc

SEQ ID NO: 837 - DNA, 36 bp, synthetic construct
  misc_feature 1..36: note = Synthetic
  source 1..36: mol_type = other DNA
ggtggatggcctaattcctttttcttcagaactgtg

SEQ ID NO: 838 - DNA, 36 bp, synthetic construct
  misc_feature 1..36: note = Synthetic
  source 1..36: mol_type = other DNA
tccactctcccctgggagctaggggaaacaagggac

SEQ ID NO: 839 - DNA, 36 bp, synthetic construct
  misc_feature 1..36: note = Synthetic
  source 1..36: mol_type = other DNA
tcccatttgtgggaactgtgacccttcctgtgtgag

SEQ ID NO: 840 - DNA, 36 bp, synthetic construct
  misc_feature 1..36: note = Synthetic
  source 1..36: mol_type = other DNA
ggacatgtctatataggaaatgacactaaatgtcca

SEQ ID NO: 841 - DNA, 36 bp, synthetic construct
  misc_feature 1..36: note = Synthetic
  source 1..36: mol_type = other DNA
ggatctctcctcccttccctggtttgcattcctttg

SEQ ID NO: 842 - DNA, 36 bp, synthetic construct
  misc_feature 1..36: note = Synthetic
  source 1..36: mol_type = other DNA
caaaccagggaagggaggagagatcccattaggctg

SEQ ID NO: 843 - DNA, 36 bp, synthetic construct
  misc_feature 1..36: note = Synthetic
  source 1..36: mol_type = other DNA
gggttttctccacccccaaaggaatgcaaaccaggg

SEQ ID NO: 844 - DNA, 36 bp, synthetic construct
  misc_feature 1..36: note = Synthetic
  source 1..36: mol_type = other DNA
ccttcttaaacatcacgagactctaagaaaaggaaa

SEQ ID NO: 845 - DNA, 36 bp, synthetic construct
  misc_feature 1..36: note = Synthetic
  source 1..36: mol_type = other DNA
cccgccagcgcgacgcctccacttatattaaacgcg

SEQ ID NO: 846 - DNA, 36 bp, synthetic construct
  misc_feature 1..36: note = Synthetic
  source 1..36: mol_type = other DNA
ctgtcagcttcaggaatgcccgccagcgcgacgcct

SEQ ID NO: 847 - DNA, 36 bp, synthetic construct
  misc_feature 1..36: note = Synthetic
  source 1..36: mol_type = other DNA
tagactcttgagtgatgtgttaaggaatgctatgag

SEQ ID NO: 848 - DNA, 36 bp, synthetic construct
  misc_feature 1..36: note = Synthetic
  source 1..36: mol_type = other DNA
tgttaaggaatgctatgagtgctgagagggcatcag

SEQ ID NO: 849 - DNA, 36 bp, synthetic construct
  misc_feature 1..36: note = Synthetic
  source 1..36: mol_type = other DNA
ccctctcagcactcatagcattccttaacacatcac

SEQ ID NO: 850 - DNA, 36 bp, synthetic construct
  misc_feature 1..36: note = Synthetic
  source 1..36: mol_type = other DNA
cagcgcaatctccagtgacagaagatactgctagaa

SEQ ID NO: 851 - DNA, 36 bp, synthetic construct
  misc_feature 1..36: note = Synthetic
  source 1..36: mol_type = other DNA
ccttttttgttttttttctagcagatttctagcagt

SEQ ID NO: 852 - DNA, 36 bp, synthetic construct
  misc_feature 1..36: note = Synthetic
  source 1..36: mol_type = other DNA
agcttccaccttcccaacaagccacctccattttga

SEQ ID NO: 853 - DNA, 36 bp, synthetic construct
  misc_feature 1..36: note = Synthetic
  source 1..36: mol_type = other DNA
gaggtaagtttttgaccttgagaaaatgtttttgtt

SEQ ID NO: 854 - DNA, 36 bp, synthetic construct
  misc_feature 1..36: note = Synthetic
  source 1..36: mol_type = other DNA
accctgtaggattcttctttccctgctaaaatgtta

SEQ ID NO: 855 - DNA, 36 bp, synthetic construct
  misc_feature 1..36: note = Synthetic
  source 1..36: mol_type = other DNA
ttcccttctcctgtggagtggcatgaagaaggtgta

SEQ ID NO: 856 - DNA, 31369 bp, Anabaena sp.
  source 1..31369: mol_type = other DNA
tgtggaggaataattcggttcaacaatatataattcggttcaacaattaataaaacgattgaacaataacctctaaaggagtacgattgtaccaagtaaaagtgcgatcgcttccagaggttatttttatggttaggggtagaagggaatggactcaagctaaatatgagcgatatataaaagaaggtcgtggccgaggaagtggtaagcactataaaccttggcttacaatccaagatgttccctctaaaggacgttcttctagaactcctggttggaaaacaaatcgagtacatcatttcttctcagaccatgaaaaacggctattttatttgtttgagtggtcagatatagtcacagatataagagagcaatttcctttagacaatctcgatctagccatgagtattgctacagacataggtataaagtaccctgtagatacacaaagtggcactcctcacgttttaacaagcgactttatgcttacagtcaaccgcgatgggaagcagatgcagattgcccggactgttaagccgtcaacagaactggagaaaaagcaagttaatgagaaattcgagatagaaagacaatattacttagcaaagggtattgactggggaattatcacagaaaaagaaattcccaggcttttagctgaaaatgttgagtgggttcattctgcttataggctagaagcaaattctgaaatggacactgcacaactgagtgaattgtcaacaattttaaaatctaagcttcaggaagaagatacaactataaatagagtaactactgctttagacaaagaaatgaatataaattccggtacatcactttatgtatttaaacatttaattgctaggaaagaaatccttgtggatctagtagcaataaaattatctgcttgtccgtcaactaaagttattgaaaaaataatattttagacccacatgataggtaaataatatggttaaagatttatttgtcaatgatttaatagagtggattgtataccaaaacactcatatagtcgaaagaattatttggatagatgaaggttacattattgcatttgttatagatattaatgctaagaaaggtctacctgaaccaaggaaaatatcagatattttagaagctataactgaaggtattgcttttaagcagcaacaagatccttgggcaagaattattcgggatgaaaatttgacagataaggaaaaggaatacagagataaagcttgggagataatttcatcattaattatagaagaaccatcaatatattatagaaattttagaggatcgatggttaaagaagcggttgaaaagtacaacgaagaaagggataaagataaattagtagaaaaaaccgtctatggttatttgagaagattttggcagagaggaaaaactataaatgctctcatacctgattttatcaattcatcaggtaagggcaagattcgaggacaatcgggcaagaagagaggaagaccaagaaaatatgcacatgacccagatattggtgaaggtgtaaatgttacagaagaagatagaaagatttttagagtatctataagcaaattttacaataatccaaaagaaaactacttaacaacagcctatgaattaatggtgaaagaatattacaaggaaggaattagatatgacgagaatggtgttcaaaaatctatattaaccccaactgataaaatacctacaattactcaattcaaatactggtatcaacttgaacaggatgatgttaccaaaactttaacatctcgaaaaggagccaagcgagtagctttagagaatagagcaattttgggaaactctaagatggaaactattggccctggttctagatatcaaattgatgccacagttgctgatgtatatttagtttcaaaatataaccgtgactggataattggtagaccagttatctatgtaattattgatgtttttagtagaatgattacaggtgtttatgtcggtttagaaggcccatcttggataggagcaatgatggcactagccaatgtagctacagataaaaccctgttttgccaggaatataacattaatattactgaaaatgaatggccttgcaatcaaatgccagatgcaattttaggagataggggagaattagcaggtatgacagtagaaacattaatccctaatctttatgttcgtattgaaaatgcagcttcctatagagcagattggaaagggttagtagaaagacactttcgtataattcatgaatatgtaaaaccttttttacctggttatgtggatacggattttaggcaaagaggtgcaagggattataggcttgatggcaaacttgatatagatcaatttactgagattattattcgtttaattgttcaccataacaataaacctcttactgaatatgaaagagatgaagcaatgattgctgatgatacccctcctatacctagagagttgtggaagtggggtatcgccaatcgttctggcagactcagaactttttctgaagatattgtcaaattgaacttgatgcctactgagaaagcaactattactgctaaaggcatcaaaatgagaggtaaggagatgtactatacctgtgatagtgctaaaaatgagcaatggtttgaaaaagctagaagtaatctcctttctaagtcagaaaaatcattgattgtatcttatgacatcagaaagccaaacttcatttatcttccatctagtgatggtagagattttgaaaaatgttttcttattgacttagaagggcggtatgctaataaaaactttcatgatattgaatatctgcttgcttatgaagaattgcaaagacagaaaagccaaggtaaacagctacaagaaaaggtagatttaatagctgatattgaaagcatagtagatagagcagaaaaaatgactgatgcttctcaatatcataatttaagtaagagcaagaaagtttctggaataagagataatagggcttttgaaaaggctaaacgacgagagaatgaaggatttgaattagcaattacagataatcagagcagttttcaggttgcagagagtacagcagaaacctccgaacagccagaatcactacagccaaaccatctgaatcttcttaagaaaaagcgacaggagcgaaaacgtggacagaattgagagtgaactggttaaaattcctaatggagaactagcagttattgccagatatatagatcaaaaactgccagaatacaacactaatccattaattcaggcattacctcctatcctatcagcagcagaatttatagataaagtagccagagaaccaaattttgatgaacaagagagagagctagaaccacattatagatttcattgtattgagaggttatctagatattttgaccctcaaaataaaactcttgaattacaaaaagttatttgtacgcttatcatgacaggctatctgtcaaggaaccttttaaaacctgaatatgcaaatcgctctaggcaaatttataatgcaataggtaatggaggaggtaaaaatttagaaaactatgttaatcttcctacatctgcgtccggcttaactctaattggcccatcaggtattggaaagactacaaatttcaaaaatattcttgagctttatccccaaataatttttcatcctgattatagtgtttaccaaatagtttggctgcgggtagattgccctaaaactttaaaggggttatgtatagatacttttgcaggtatcgataaattgttaggaactaatttattaaagaaatttaacccagcacgcacatctgaagattatctattggctcaacttgcacaaacagcacacactcatcatctaggagttttggtgattgatgaaatacaaaatttagcaactgcaaaaagaaatagagacgaaatattaaattttttagtaaagctcgataatactattggaattccagttattcgtgtaggtacgaatgaagccattagttttcttcaaggtaatcttagaaatgctagaagaaatactggagaaggaagtagaatgtgggatagaatggtaaataatgatgaatggtgttactttttagaaggaatatgggaataccaatggacaaaaacacctgttcatttctcggatgaaataaaagaagttttttatgatgaaagccagggaattattgatattgctataaaactttacaaaatggttcaatggagagcgatttcaataggtgaccaagaaattattacggttgatctgattcgtcaagtagctaaagaaggattgtatttagtaaagccaatgctagatgcaattaggttaggggacagagagtggatgattaaatataaggatattgctcctctcgatattacggaatatcacaatagatgtgtatctgagattgatgctaaagatttgacagagattaagagattagctaaaaagcagcagaatcagcagaaagtatctccgaagctcaattatgtaattagtgagctgttgaaattggaagtagaatctggtaaagcaaaggaatgtgcagaacaaattgtttatagtcatgaagatccagacattccaattccatctttagttaataaggcatatgctcttgctttgcaaggatgtcaagtaaatgagagtcttgctaaaacaagtaccaggaaagctaaattaaagacaaagtaccaagagaatgatattcggcgaattgtcgagaatgccaagaaagacaaaaaatctgcatacgaggatttgaaattagcaggtataatcaaaaatccagttgaagattttatcaatatttagcttctaaatgcttagttttttcccaactctgtatcccgatgaacttttatatagcactttagctagataccatattcggagtggaaataaaagtttcaagcaaactgacttagagctattcggttacagttcccaacaaatatgcaaaattaccttaactaataatttaaattatttagtgaaaaacttacctttacgctcccagcaaaaagttgagaatttactacaaaatcatactttatattccttttatgcaactttattaatgccgcaggaggcttggctgctgaaaaactcaatgagtaataaattcagtgggtctatactagattttgctaaagtggctaataattctagtgatgattcaaaaaaatttttaaaattttgccctgaatgtttagagaaagatacccaaaagtatggtgaaccttactggcatagaatacatcaagtccctggcattttagtttgtccaattcatcgtgttgttttacacaatagctgtatagaagttgaatcgaaaggcatacattatcatgctgccagcatagataattgtttattagcaaataatgtgaaaaaattgacaaataaaactgtagaaacactttcaatactggcacatgatattaattggctaattcatagcagttttgcctttcaaggtttggcttggcttcgcgctcagtaccagcgttacttattggataaaggactgctaaaaacctttgctggtggcaagtttaagtttaatgattgtggttttgcccagcttatatttgagttttatggtcaagaatccttagaagccctcaatccaaagctgacccaaaatcaaggtaaatatttttctcactgcttgtttggatgcgacttaaacccagcaattgaccgcataactcatatcttaatgataaaatttttagcaaattctatagaagagttctttcagtcataatcttcatatacaaaatttaactaaattaataaaaagcaataataactaatcaaaattatttttattgattattattttaagtattttcagattagtgaatcaggtaatctaagtaataaggtagttatttcatacctggttgtatctgcttaaatctgctatataaaaatgattattgatagtaacttagttacgcagcttccctcagaatcatcttcaaagccaagagagcttttaatgtctcagtttccatatatggatttaacttttagccttacgggtgagacattacctttcgaccacggctatgaattattttctgcgatcgcccactttgaacccaaactacatacattagacacgttgggaattcagaccattgcaggtattcccaaggatggtgtaattaatctgacccaaaattctaggcttcgtattcggataccagtaaatcaggtacgtttggtttatccattggcgggtaagtcactgagaattggcaagcatacaattcgtttgggtattcctgacatctgtttgcttcaacctgcggagaaactgcgatcgcgcattgtggtaataagaggctatgaagaacctgaaagttttttagtcgtagcgcagcgtcagctagaacaactgggtatccaagcaattgctagcattcccaccaaagccaatggcaaaccaatacgtaggactatcaaaattaagcgatttacagtcgtgggttttggattagaagttataaatttaagcgatgaagactcactgaggttgcaaatacatggtgtaggaggaaagcaaaagatgggttgtggactcttcatgcctattaaggaaaggcaatagcaattactcgaaagcagatgatgaagagagcagataaccccaaaattcagcttaatctcggcgatcctagtatgactttattgcatcgtgctggggttgcaggactttggatgacgctcaaaaaactggaaaaaatctatccaacacctgctgaacgtattggtaatttaacttggttgctaacccctcactatatcaatcttgattgggaaggacaggatttcacagttttagactggttgctgaagcaatcatttcaaatcagcgatgagggtttaatttccctgacagggttagattctcaaaacatggatattcaaaatcaaataattatccatcaaggtatcacagccacttttacacaacataataaattttttaagtctgcgggtcaacaatctaagcaactaattattgatggtattcaggttagggttgattataagaaagctgcttcctatgctcatcaacattttgctaaacatttatgtgaccagtacggacaattgctaaaagagccaattggtatcaggggatggctctatccaggagcagtagttcgccattatgcttttaaagaacaaacagcatttgaagaaaaagcagaatatgctctagcgttgttgttcgctcctatggcttgtcaatattttgtgctgcgatcgcacaccgaaccatcacatacaaactatgttttggttattcctgaagtaattgatttagaactttatgcacattttttgtggtgtttgggtaacttagattataaacattttcacgtatctagcttaggagatgctggattaaaatttcttaattataaaacaacacaaatgcctacttccaattttttaaaacgatgtcaaataatcttttttagtacaaaagcttggtcagaacagcaaaaaactcgtgcagaaatagcaatcatagaattaaattcttcagttaattatctttataagcttagttgtatttgttttccagaatgtcaaattgttttatataaaaatcaacattatttgcttccaagtttaataaaaggaataatcgccaataatctagcaatgggtcggtcttggtgggctaattggatttcatttattaaaaataaaaaatcatttaaacaatttactgatgagtataaaggaattaataagatgattcaggactcagaatgggatatagaagctcaaaagctatttattcaagcttgtcatgaagcattaagaaaaatatatgccaaaatttatagcagaacaaaagaaggtgaatacgctcaaatagaacgagaaaatacacgcattttatctcagttaaaacgctgcaccaatactgacaatttccgaaaatttattgcagagttttggggaagggcagggcaaatagcaattctggaagaacattggatggaattacttccattgactacagggataggcaattggaaagtggccagggacttaacttttattgcaatggctagctacccaaagaataaaataacagaggtagaggtaaaaccatcacaaatatcggagctaaatactgaataaacttcatattttttgatttgattaagaacaaaatattaattgtttaggtaatggtggaatgtttcatctgtttggtaatattttgactagttatggaaccgccgctaataatcgtggtgaaaatgaaggtaataccactacgttacaaaaattaatttggaaaggtgaagttcactctactgtttcatctgaggcaattcgttgggcattgcgatattattggcaaaatgctggctatcctgtgaatagacgttgggatgaaaatgctcaaccagtacccgatcacatcttgcaagatcctaattttgatgatattcgcttcattgatgatgatgtcttgggatttatgcaagcggaagcagcaaaagttgaagcagcagttgaatccgaagttgaaatccagaactcaactcaagatgaggacaaaaaactttctcaaggtaaggagaaagaaactgcaaaacgtaagcgtaaggaaaaacctaaagggaaaataactactagacgaggtgtattagaagtcactcgtgcagtttcaacaattccttatgctggtgatcttactttcaatgctatgagtggaaagaaaggacgaacatctctttattctacagaagttcatgctactcgatatcaatatggcttcgcattaacacccaatagcctcaaagataaatctcgcattaatgctgtcctcgatagcttaatttctattggagaagtggcaggaaatcacgctcgttttctctatgatttttctcctgatagcatcatattacggtggacacacgatttctcacctcggttactttactgttttgaagaagatgaacttagaaatatatcaacaccggatttagtaaggcgggtagaatctggagatatagaccctaaagaattatggataggaggggcaatttctagcactctggaagatttaggggcaaatgtgtttcccggagtgaagacaacagttgaagcattaaaacaggtgattattgaagatttgcagttgtcgttaaggagttcatgatatgacgacaattgccttaaaagtagaagttcccatagcttgttttcggcagtctcgtgctagggaatatggcgaaacttaccctgtaccaccaccatcgacagtatatggaatgttactatctcttgttggagaagtggatagatacaaacactgcggtgtgaagctggcgatcgcacttctatctgaaccagaaaagtcaactgttattcgcacctttcaccgatttaagacgaagaatatccatgactctaaaaataataaacctgattatcaggagttattaactaatatagaatttatagtttgggtggatgctggagtagataaagctaaaccaaatttagtggaacgtttagcagaggcattgactaacccggcttctattaataggtttggtggattatgtttaggtgaaagtcgggatttagtgaatgatgttacccttttacctaaaaattactatgcagaatcaatgcgatggttaattcgagatgaatatgggttactaactttaccttactgggtagaccatgtaggttcgcggggaacgcgatggctacgttacgagattcagaaatgtccagtctttcaaccacctgaattatcttggacttcagttcaaagtaattagaggatatctttacttttgcaagcacctctgcttgggaaatttaaaaactatagaaagtagccttaattcgttattctacaagccttttaaggattttatatgcttctagagtgcttgcaatttcctggaatgctctaaatacaagagttaggagtgttaaaaactttacttttgctatgaatagctattaatttttgcaacttggctaaccttaaagagtaggtgcttgtaaaattgatgtagagcttaggcaagtcagcaaatgtggctatcgctgtgctttaacattagatgtcgttaggcgttgagcagggggctgggtcatcatattgatctcgctcagtccgggtgctttaacattagatgtcgttaggcgttgagcaacgatcgcaacccttgattcatgaaatgcttggtagcgtgctttaacattagatgtcgttaggcgttgagcaggattcccagaggcgaatgtatttacgggttattgtctttgctagaaatatgttgtcagtgaagccaagattagccctcttgattaccatcattccgagaaattttactgagaattttttcccactgctgaatctggttctgtatttgtaattggggatgggcttccccccgccgtaggcgatcgctcaaatcttgactatcatcaacagacaaatcctgaccgctcaatcgctcacggtaaagagcaatcagttcggttagggcttttttattgcttgattatcctcctgggtcagagaactcacattgactgggatcagctttctgccaattctctcgacaaactcagaccgacttaaatccatgctgtcagcgatcgcatctaatccatcaatcccggtaggagttagggctaggttaactctcttctttacctcatcgtacagttctggtacgtctttttgacctttttgccctttcttacccattgccgtctactttttacattcctcccaatcatagtaaacacattcagcactttaagttatacattaaaactttttccaacaggttaggtattgtgtaatgcctgagttggttggataatataggtattgcgtaatgcctaaatagtcatttttttagggatatgagtaactaataccaccgtttggcttgccaacatctaaacggcttacttttcatgggcaatcattaattgctggttatgtaattcaaattaataaaaatctgctaaatgatttggtcatttttaacaactatatggtgagttttttccctcaaccttatccagatgaaattttatatagtgttattgctcgttatcacattagaagtggcaatacgagtccaaaaattacattacaagatttatttaagtcacagactactgtggcgacagtagatttaccatcgaaccttagtaatttaattaaaaacctacaatttatctcaaattaccaagttgaagagttgatatataaacatactctctaccctttatatagcccttttttgccagcaaacaggtctagtcaggtactggaatctatgaaaggagattatgggggagatattcatacaagagccggaattatggcaagctcaattactatgccgaaatatttgcggttttgtccaacttgctgggaagaagacttaaaaaattatggcgaaccttactggcatcgcatccatcaaataccagggattttagtttgtccatttcatggtgaagttttgcaagatagcctagctcctttacatggttttaataagcatgaatattatgcagctagtacagacaactgttctattactaaagaacccagtattcttagccctgacacactgaaaaaattactaatattagccaaagatttttggtggttactcaatagtgaaataccttgccaagagccacagtggtttcgcaaacagtacacaaatctgatgattgagcagggttttgcaactccaactggtcgaatttaccagaacaaactactagataattttttgttcttttatggtcaagaaatgctcagtgctgttgattcaatggtaaatcataatgattcaaacaactgggttactagcatcgtcaggaaatataggaaatctttccatcctcttagacatctgctaatgatgcgttttttgaaaacatcagtagaggaattttttcaaaaagatactgaatacaagccttttggcgaacccccctggttgtgtctcaatgctgccgcagaacattatctacaaccagtgattaccaatttagtcattactttatgctgcgatacaaaaaagcctgtcggtactttttcttgtgcttgcggaatggtttattgccggactgggcctgatgaaacggatgaagacaaagttcgcattggtaaagtcaaggcattcggtcaaatatgggagcaaaagctgaaagaattggtggaagttgaaaagttgggtttgcgggagacagccagaagattaaatgttgatgccagaactatcaaacgttatgtatctcgtctaaaattgacaacttattggcagactagaacagaaaatgactctgtaggcttacagggagtcccagaaatagatcccaattttgcaactgaactcaaattaaaacacaggcaaaattggatggctttacaagtacagaaccctgaagcttcaaagacaactctgagaaaactagtaccagccacctatatttggctatacaggaatgacagagaatggctcaatcaaaactcacccactttacaagttgccgttccttccgttgtgagagttgattggcatgagcgagatcagcaaattctcgctcaggttcaagatgcagtgcgatcgctacttaaggctgatataccagagaaaatttctattagtagggtagggaaaactatcggcttacttgcattactcgaaaaacatctcgaccagatgcctttaacaaaggcttatttggaatcagtcgttgaaactgtagaagaatttcagatgcgccggatcaagtgggcaatcaagctgcttgatgaatgtggagaagaaattatgcgctggaaggtagtcagagttgctgctttgcgagaggattgctcccaaagagtcagtgcatttctggaaagtgaactggagaaagcatacaagaaagagaggtgattcaattcacctctccaagtgatgggataaatgctttgtgtgttaggccgcgtcggctaccagtaagccatttatagcgatgatgatgatttgcgctgctaaaggagtatcacaacgtggtctatcgtcgctattacagggttgtgctacccatttaccctccagattttggtagaaagtgccgagaagttgagaaccattccaaacacggtaaagctccccaaatacttcggataccgaatcaatctcaatttctggtgcttctgggtcggcaaggtgttcaatatactcctcaaactctgagtcagtcgaggctgagtttctaaactcatcttgtacaatcatctgagtaacctcattgatggggtttaacaaaaggcgatcgcatttctcttcccggaggggcgatcgcctttttgatttcagattttgttttagctactatagtaaccaatatcaatatatgtatgaaaaactttattcagtcacttccaccgtgctaagaaaatcctttaaagaaatacccaaagccaagcaaacagcctctaagacttttatggagacgctttcagattcgccatactctaattttttcaggttttgatgagagcattccccacccttagccgaaatttcatctaccaatttctgccgggactttttaccacgtagacgctttaaaacttctgctctgtctttattccaggttacagaaacaacgtctgcaacataaatatacattttagtttctttattcctttcattggtcatataatagctacagcagtaaacaaagcttattgatttcggctactacagtttacaaattatgggaatagaggtaagcgatcgcatgaaatcaaatttttcaagttgtggatcaggggagtggctgtttttgtcacagaacccaatgcgtgcatataatttcataacagataaattaccgacctacagcatctaaagccttgaccccagaagaactaaaacaacttgaagcgaacctttggcaaagtgctgataccctacgggcaaactcagacctgaaatctagtgagtattctacgcccgtgatggggttaatatttctcaagtttgctgataacaaatatcgccagtatgcggcagagattcagcaagaatatgaagcactcaaaggaactcgcagagaaaaggcgatcgccgaaattgccattgagaagtgtgggttttatctgccagaccatgctcgttataactatttgctcaacctaccagaagaggaagatatcgccaaggctatcaaagcggcgatggtgtccattgaatcatataagccagaacttaaggacaccttaccccaagatgagtattttcggctgacgcgcacagacaaaggtattccgaagcaactgttaaaaaacttctcgaatattcctgaaaatgctactggggatatgttcgggcagatttatgagtattttctgggtaattttgctctctcagaagggcagggtggaggtgagtttttcacaccgcgttctgtggtgcggttgatggtagaaatcattgaacctcatcaggggactgtgtttgaccccgcttgtggttctgggggaatgtttgtccagtctgctcaatttattgaagaacagcgcaaaaagttaaatcagtctgctgctgacgatctgtttgtctatgggcaagagaagaccctggagacggtgaagttggcaaaaatgaacattgcagtcaatgggttacggggcgatgtgcgtcagacaaatacgtactatgaagacccgtttggcagttttggcaagtttgattatgtcctagctaatccgccatttaatgtggatgatgttaatcttagccgagtggaaatcgatgctagatttaacacctacggtatcccgcgcaataagactaaggggaagaagcaggaacagggtaatgagactgtacctaatgccaattatctttggattaatttatttgctacatcgctaaaacccaagggtagggcggcgttagtaatggctaattcggcatcagatgcgcgtcactctgaagcagatattcgccaaaagctaattgaagaaaatttgatttatgggatgctgacgctgccatcaaatatgttttatacggtgacgctacctgcaactctgtggttttttgatcggggcaagacggatgataaaattctgtttattgatgcgcgaaatatttttactcaggttgaccgctcacatcgggagttttccacagaacaaattagtaatattgctattatcagccatttgcgccggggtaggagccatcggtttattgaactgattaataattattttcagcaagggatggtgaagctaagagagaatcaagcacaggtgcagcaagtttcccagcagttaatcactgtgttgaatgatggaatggatgatattaaagctagggaagcggctgttgattttctcaatttgtgggatgatttgccagatttagaaattcagtatcaaggttatttagataaatataattttccagaaataaatatagaaatacaaaatcaagcacagcaagaactcagtgcggcatttaaaccattttttgatgacatccatctgggattgaagcagcttgataaaactatccgcgcccatgaaacggctttggcagaaaaagcaaaggaagaggggaaacggggacagattgacaagcaagttaagactctcaaagccacgctggaaacgctgcatacagatgtaaaatcggcagaatcattttttatccacattcgctggttacaggaacgtttcccgaaggcagaatatgaggatgtgacggggttgtgtaagttggcgactcccgcagatgtgaaggaacaggattattccctaaatcctgggcggtatgtgggggtagtgattgaggaagatgggaagacggaggaggagtttattgaggagattttagggtggaatacagagttagaaaagctgaatcaggaagcaataaaactaggagacgtaatacgtcacaatattcagcagttagtaggggaataacaatttatgaattgtatagaattgagtcttgctgatacttgtgaatttataaatggaggtgcatggtctgataaagagtatgtagaagccggaattcctgttgtaaaagtcactaacatggttgatggcacaattgaaactaataatcttagctatctaccattatcaagttctgataaatacaaaaaacatttattatttgttaacgatttagtagttaccactgttggctctcatccaacacaaccggggtcagtagttggtagaacgtcagttgtaccacaacattttgatggagcttttctaaatcaaaatgcggtatgtattagagtcaaatgtaaaaatttaatatctccaaaatttctgatatatatatctaaaactatattattcaagcatcatattgaatcacgagctagaggtagtgcaaaccaggtaaggatggcacttggagagttgaaaaaatttacattcaaatttccccctcttccggttcagaaaaagattgcggcgatactttctgcttatgatgacctgattgaaaacaataatcgccgtattgccatattagaaaaaatggctgaggaaatctaccgcgagtggtttgtgcgtctgcgctttccgggtcatgaacaggttaagtttaataaaggcatcccggagagttgggagagaaaaaggttcgatgaattttgtctactccagcgtgggtatgatctaccagatactcaagtaattcctggtcaatatcctgttatcgcgtcaacttcaattaaaacttaccataatcaatttaaagttaaccctccagtaattacaactggtcgttcaggctctttaggcataattttattcatcaatagtcaagcatggcctttaaacacgacattatttgtaaaaaacttttatggtaattcaccctatttgatttactacacactaaaattcttaaaacttgagaattttaattctggtgctggtgtacccacactaaacagaaatcatttaggtggactatatatgtccgttcctcctaaaagcctgcaaaataatttcaatgacaaaattgcaattctctttaagcaaaaagagcttttatcaaagtcaaagaatgcacttattgaaatacgcgatcgcctactaactcgtcttatctcaggtaagctttccgtcgaagacttagacatccaattcccgcccagcatgacagaagaattaaaataaatagtaagatttggaatttccctagatgagcgtcacaattcccgatgatatcctcagagcatcaaacatgacagaggatgaactgaaattagaaattgctatcttgctttaccagcaaggtaaaattagcagtggcaaagtccgagcatggacaggaatcacagtcctggaatttcagcatgaattagccaaacgaggtttacacattaactatgatgttgaagatttccaatctgatataaagacactgcaatcaatgggtttgctgtgattatagttagcgatacatcaccaatcacaaacttagccgcgattggtcagttagatttattgcgacagctgtatggtagcgttatcatccctgaagctgtatataacgagatggctagtgtcaataagattgtccctggtgcagtagaggtacaaactttatcttggattcagacacagacagttatgaattctctacaagtcacagaaattcaagagaataacgaaagtattcacttgggagaagccgaagcaattattttgtccttagaaatgaaagctgacctgctcttaatggatgaacgcagaggacgaatagtagctaccaattatggaattaatgtaacaggtctgttgggagtcttgctacaagccaaaaaacaggggctaattccagttattaaaccattgattgatcagttaattacccaggcagactttagagttagtcctcagttgtataccgtcgtcttgcaagcatctaacgaggtttaaaccttggatcaaaccactgccgacaaagcggtgtgaaatcactacacatttatacagccaaaggttaaaatttgtacatcgggagagtataaatatctaaaacggtcattaccgtgtagttttcctaaactatgcctaactttatttctgaagatgacatcgaacaagcggtacttgccaaattaaagcagcaaggctttaaattactcaactgcttcacaaccaaccccgacgatctcaacgacagatccaaccgcacagataaaagcgaggtcatttttagcgatcgcctgaaagcagcagcaattcgcctcaaccccaacttaccagcagaagcgatcgcccaaggtttagaaactcttaccaataaacgccagttgatgtctcccatcgccgcaaatcgggaaatagacaggctaattcgtgatggtatccccattgaatatgaaaacgcccaaggtagaagcgaacacgggaaagtgcgcttaatagattttaatgacttgagtcacaacggaaataatgaatatttagccgtttcccaactttggattaaaggagaaagaaactatcgccgtcctgatatcttgctatatatcaacggtttacccctggttttcatcgaactaaaaaactccaacgtcaaactgcaaacagcctttgacgacaacctcagcaactacaaaaaagatattcctcaactctttctcaccaacgccttctgcattctctccaacgccctagaaaccaaaattggcagttttaccgcagagtgggaacacttttttaactggttacgggtggaagatgaaaaggaaaaaatagatcgtcagcagattcaagaatctggtactagcctagaactagctatagatgggctttgtcacccttctaaactactcgactacatcgaaaactttattctctatcacaaagaaactcagaaaatcatcgcccaaaaccaccagttcatcggtgtgaatcgcgctattgatgcttttgaccaccgggaagtaaaacagggcaaattaggagttttctggcacacacaaggctctggtaaaagcttttcgatgattttttatgcccgaaagattttccgcaagctcacgggcaattttacctttgtgattattaccgaccgcgatgatttagatgggcagatttaccgcaatttcttaaacaccgaaacagtcaaagagaaagaagcagctcgacccaaaaacagtaaacaactccgggagtttctttccctcaacaagcgaatagtttttaccctgattcaaaagttccgctacgagaagggggaggagtatcccatattgagcgatcgcaatgacattattgtaattgtcgatgaagcacaccgcacccagtataaaaccttagcggaaaatatgcgggcaggtttacccaatgccaattatctcgccttcacaggtactcccctattaggtaaaaagcgcaagactaacgaatggtttggggattatgtcagcgagtataatttttctcagtcagtagatgatggcgcaaccgtccccctgttttaccagaagcgagtaccagaggtactgattcaaaacgaggatttaagcgaggaattttaccaaatccttgaagatgaaaaccttgatgacacccagcaagccaagctagaaaggaaatttgcccgcgaaaccgaagttattaaacgtgatgataggttagagacaatagcaaaagatattgtttaccactttcctcgtcgtggctatcttggtaaaggcttggtggtttctcttgataaattcactgcggtgaaaatgtacgacaaagtacagtaccactggaaagcagaaattaaaaatctggtgggacgaattaagaaatctagtaatgatattgagaaaattcgcctgaaaaagattctcgactttatgcgagaaacagaaatggctgtggtgattagtctggaaggaagcgacagcgaagttgaaaaatttgcgaaacaaggacttgatatcaaaccccaccgcgaaagaatgaataccgttgatgcacagggacatgatatcgagtatcaatttaaagatgaggaaaattccctgcggttggtgtttgtctgcgccatgtggctgacgggtttcgatgcgcccactctctcgacgctttaccttgacaagcccatgaaagaccacacgctgatgcaaactatcgcccgtgcgaaccgcatcacctcatatcagattcacaacgtcaccaaaaccaacggcgaaattattgattattacaacgtcttccgcaacatgaagcaagccttggcagattacgctttgggcgatgatggagacaaagaagactcacccattcaagaaaagtctaacctgtttgagttacttgatgatgcgatcgcccaaggactgaatttttgtcgggaactggggattgatttagaaagcatcctcaaaattcaggaaactttcgagaaattaggacaatttaaccagtttgctgacactctactgcaaaaagatgaatggcgtaaaggattttttgtctatcaaaatactattacctcactctatgaagcctgtaaaccagagataatcaagaaaccacgtccattggttttcatcttccaatatctgcgaggggtgattgatagcatcattgaacgcaaagatattgaccatgcaagtttaaaaattgcggaactgctagatgaaagcgtagttgctgataatcaaggaattaccactaaagaatatagtgcagaatacaacattatccagacaggtcaagtctgggatttaagcaaaattaacttcgagcaactcaaagccgaatttagctacaaaccctataaaaatattgaaattaccgatttacgcagttttattgaagacaagctgaacaaaatgattcagcaaaacaccacccgcaccgacttcgcccaaaggctacaagccatcattgacaaatacaacgctggtggttcatcaattgataactactacgaagctctggttaattttacagaaaacctgaaagcagaagcagaaagacatattcgggaaggcttaacagaagacgaattggaactatttgatttactcaagaaagacaaaatgactgcggaggaaactcaaaaagtcaaattagctgcacagtctctcttgcatcgactcatagcagaacaaccaaaagtcttagtgcaagattggtataaagatatgcagagccagcgcagagtgcaatccgtagttgaagcagttttagatcaaaacctgcctgaaagctatgatagagcgttatttaagtttaaatgcgatacagtatttgatttgatgtatgaccacgctagcaaaggttcaaagtgggcgggataaaaggtattaattttaacaagctttctagcttataaactaacgcacaaaaaaacaacctctttcaatatgtccttttagctgtcagcaattattgaggaaagtaggttgggatacgtcactggatctaagcgtaaaaacaatcactgattaagaaataagtagtgttagctaagaagaaaaatagcaacccagaaatcaaatatagtgtgtttaaaaatttgggatgggtgcggttagagcaaggtaagaataaagaagcacaacaacgtctgcaagcttcaaaaatgtttcgattcctttaatgggataaatttaagtcactagatatactacggtatcctcttgaagctttactataaagtagttcacaactttatactgaattggtttttggagacaaatataatatcttagtgctaaaatatctagttttggtctttaatagtacaattgatctacatcaatgaggatagaccagttatccaatagcagttctaaagtatggctcgcggtgaaattctcagaaaactctttaaaagcttctctcgcaacgagagagaagagtttttggctgcggctcaagaactgattgaagaagaaagaaataaaaatcacatcctgctggctagagatttggaaaaactgcttcaaaatggcaatggctacactaaacccctagcatctaacctagctccctggcatcagtttcctgaaccacctaaagataaagacactggactagctttactggatgtcaagcgatttgacctgacatgggataatatcgtcctcagtgaaaaaatttttgatatcctgcaagaaattgttctggaaaaccgtaagcaagacatccttgcagcttataacctcaaacccaaaaacaaactactcttttgtgggccaccaggttgtggcaaaacccaaaccgcaaaagttctttctagtgtcttgagtttaccccttgtttatgtcaacctgacagcagtattttcttcttacttaggtgaaacagcaaccaatcttcagaaaatttttacatacatagaaaaaggcgaatggctggttttattcgatgagtttgatgcgatcgctcgtgatcgagataacttaaatgaacatggtgaagtcaaacgtctagtcaatagcttgttacaactcattgataatgcaactaatcaaagtatatttgttgctgctactaatcacgaaaaactattagacagtgcagtttggcgacgatttgatgaggtgattttctttgacaacccaacactagaattacgcacggctcttttaagccgttatctgtctggtatccgttatactgctattaatctatctacttttgcagaacggctagaaaatgctactggagcagatatagaacgtatttgttctgatgcaattaaagccgtaattctacgtggggagcgtaccttgagagctgatgatttagaagttgcgataggacgttttttagaaaggcaaagtataatatcaaactcaaaattatcatctaagtcaaatcctaatggtaagtcagtttgaacaccttaaattaccgagaataatcaatatcgaattaccacgacgatctcatggtggaggtggtggtggaaaacgcgctgattttattgaacatggtaagcatttattagatcaactttctggactgacggaacgtaccaagcaaaagagcaaccctttccgccttgatccaaaattaatttttaagattaaagttactaaaaaactttcagacgatctagttaatcagacaggattagatatcctagcatttgagcctgataaagccatagttgtcttctcgtctgatctggagttaaaagaatttaggagacgtttagaaaattacagtcatattacagaaggacacgaatattcatatttaggagcgattgatgagttagtccccctcgaacgtgaagatcgcattggtcgtttgttagagttaaagcctgtacaactaggtgaacttgcagctttagatttagaattatggcacacaggcgatcgccaagaaatgaaagtttctctagaacatattgctgaaacaatagagtacttttccagcgatactgctcctatgagaatgagtgatagttacgttggtgaatatctgtgtatagctagaattaaagtcactcacgaagttttagagtttttactggaactcgaaactgtcaaagaaattgatcgtcctccccaacctgcatttgagagaactgccgattataatttaccaatttcccgtatacccgaagttatttctccacctgaagataattgcggcattcttgttattgactcaggtgtacaaagaggtcatcccttaattgctcgtgtactcggtgaagctgatgtatttccagatccagcacagcaattaataagaggtggtgcagatgatgtacatggacatggtacaaatgttgctggcattgctatatatggagatgtcgaaaattgtattaaaaaactgtcatttgatccaacagtttggttattttctgctcgtgtaacagatgaaaactgcgaatattatgaggatcttctcgtagaaactcaactagatcaagccattcgtgcttttgtagatcagtaccctaactgcaaagtcataaatatttcattaggtaatgctaaacaaatctatagagatggaatgaagcagtttcgattagcagcaaaaatagatgaaattgcttatcaataccaaaaccaaaacaaaaatattatttttgtgatttcagcaggaaattcttatcatgaagagttagggtatgaacaattacgaactgaatacccaaattatttactgaataagaaggcccgaattattgatccagcaacttctgcgatcgcactaactgtaggttctttatcttatggacgtggtagtatgacagaacctggtgatgtgcgtcgtcaggcgatcgcaaaattacgaggatacccttctccctttaccagaactggttttggagtagatggtatgattaagcctgatgttgtagattttggtggagatttagcattagaccttagttatcgagaagcgttaggtttgcctaaagttagtcaattagaagataatgtagctgggatttctgttgttactttctccaaaaatttccaaagttctttatttaatatctgtagcggtacaagttttgctgcacctcgtgtagctaacattgctgctcaactcttcacaaaatatccaaatgccagttctaacctcattcgagcattaattgtcaattctgcggtgcttcccaaagaaattccagatgaatttagtaagggtacagaatctaaaaaaattaaaaagcagctacaaatctatggctatggacagactgatttagaacgtgcaatgtattctgctgaaaactatgttgttctatctgaagataatatttttattccagtgggcaagttccatatttatgaaatcccccaactaccagaggaattttttgatatagaaggtacccgcacattatcagttaccttggcctttgatcctccaactcgtccaactcgtggcgactcatatttaggggtaactatggaatttaatatttttaaaggtattgacaaggaaagtgtcgtaaatgcctatgtagatgcaagtagaacagataagcctggtgaatttgcagaaataccaataaaaaatttgaagaaaaaatatccaaaacgtagtattactattgatttatccccaggttccaatcttcgtaagaaaggaactgtacaaagaggtcaaacacaactaaagtcaggagctaagaaatacaataatttaccgatgactttggtggtgagttgtaatcgtaaatgggcaaatccagatgaaattgaaatccaacgttatgctttagttgttagcgtcagtcattccgatccgcaagttaatttatataatcgtctaaaactaaaggttgatgagattgatctaagagaaagaagccgagcaaggatttaaataataaaaacctaatatttaccgtaatgagaattatatatttttttgtctaagtaccgataattcaggagagtcatagctgactatggatgtcgagtgcaagattatatgtgatcgcacaagtttcgacaatgtgtggtgacaagatggcgatcacagaaagtgcgatctcattgatacatcccattgatactaagagcaattagctttgcagatggaaattaattactgctaatacaatgatttggctgttactggggagcaatcataattgaatctaaacactaatagtgataaatctttactgagcttgatttttaagaattatacaacttttttatttataaataatagctgcgctcaacaaattatacaactttattttctgagacttagatgaactagaatgtaaatgtagggcttataggcttataaattatataatttttctatatttttacaagatattttggattaaaatagcgtaattaatttttaagctgaagttattatataacaattcgttgttgatgcttcagcttcttttttaactggcaatcgcttgactttaaacattacaacaaagagcatattaaaatttttattcttccgtaagctttaattggaaggcgagagcgcggttaagagcgcacaataaagagttgttagcggcgaatttttttaaataatatccaggctattatactggtaagcactccagcaacaacgcttccaccaaagactgctgtcaggaaaaaaggtgtttctttttgtggtggatattggcttactaatattgaagatgcgatttggctgattgctaacccgataccaacactaccgataatattttctaaattgcgatcgcttttagttcgctcaatatcgataataccttgtatggtcttaatgtaattttccattaatgttaaaccagggctaaagttagcttggtcagtttcgatttgtactaaaaacttttcgttagcatagttgctgaatatttgcaaaaattcccaatcgctattactatctaactttattagttcttggtaacgtttttgataattgttgatgtttacttctatggtgcgtttttggtcatctaaatacgctaagttattagtatattttaataagatttctggggtgtttttcagaaaagtttctaattcattaattttaatatctggttttttcaagttagcattcaaattattcacaatagcttgtgctaggttagctgcttgttttaaattatctttaatttcctgactttgagaattagcccaataaattttatggcggtatcttaaaagtcggagcaattgaggagataacttgctattaatttccctaattgcatctgttttaatttgatcaggaaacaaacaaattaatagatgataactatcatgcaagttttgtgcttttgctggaagtcgttgcagttcaaatatagttccaccaaaaaacttaccttgaccgataaaatcattttgccaattttgctgcggatgtaattttaattgggcaaaacattcttgtgctgtggcttgggggtcttgattatctgtagataactggccccaaattaaccaactttgaccaaggttgccatgttggttatttattttattcagaatttctgtttgtaaattatgcaaacaatcaatagattgcggagagtatttgtaatcggatatatagttagcagtacagtctacttgcagtgcataagtatctcccatttggacgggatagtaataaccatttaaaggactgggaaaaatttcatattttttatgacctagtaattcaacataatctaaactatctgtttctgcttgggctagttctgcaagctgtttactatctaactgattaccataaactttttgccaaaaaagttgccgattttgtttgagtttttcttcatcttgtcccaaaccagctttaaggtcataaagaaacaaatcgagggtgggataaattaattgataattttgattcataatgtttttgtttcgcgtaaagacgcaaagaaagacgctataattatgactttggcaagaagtctattcataaggaaaaaatggtgttgatgacttctttcgctgtttttataggatttaacgcctgaaaaacttgctgtgctattactgctaatttattttgatcaacttttcgatcaaatttgactagctgctcttcaatttctctcgaagcattgtcaatttctgtatttgtggaatctggtttatattgaggtaaactttccacacctttactgcggagttgagcgatcgcatctatattgtcatatatttgatcgtaggcggctttgaggggagggtgactgatggcgatcgcatatagttgctcgatatcgccaggaatattaattgtctgtagttgtgcctgaatatgacttggtaatggtgagtcaagctggtagagtgcgaaaataaaggcttttagttctgatacttctaatggtttcattgtgaaaagttgccagtaatagtaaaagctgcccagaagtaagggtgattatagggttgtttactaggttctgggttattcttaagtttatttaaatggcgtgaccagcaattgtaaaggagtccttgattttcaggaactttggcaagttgcgctgcataccattgtgctagttctgcattggtgacatttcgcaaccattgggtagcttcagctaaagctatagtttctggtttaccttgttgcagcagttggtaaaactgaatcatcaccaaagcactagcggctgattctacagtccacagggtactgacgacatgagccacaccgcaacccataaagccactgacaagccctacatattctgtagtgatggtgtgatttccggtgattgcagtttcgcaagctgctaaggtgacgagttgatagctttgcaatttaaagccgtggatatccgctagagttaacttgtcttcatctgctaatgctaaaaaagataacgccggattttggaagttatatacaccatgtcctgtaaagtgaaaaatattgtagctttggggcaaagcatttatcagtgctttttgtgtggcttgttcagaatgcagacgtgtagggttggcaaacatttggctgatggcttctgattcgatttcggcgaaatctaatgagggataacccgtactgttgggatgttcgatgctaagtaaatttttttggttataattgtctttcttaacagagatagagccaatttttgcactgggtaaatagctgatggtaaattcaggtggaaacagtgcatgaagagggaagcggtgcaaatcgcggtgaggaatgagaattaattgagtaatatctggaattgtggagacgacagcatttatatcgagaatatgactcagattccgcagcatttcgggtaaattgtcgcgccatgttctatctttttcgccttgcttgtctttatccttgggataattggcgtattgttcgttccattttttcacccaggcttcaaaatcgcgtaaacgttgcgcctgagttagacactcggtattgcctaaaacaattggtgacggggcgttatgtttaagaatgaaagtatgtaaggcgtaagaactgagatgccaataaacaatggcagttgaaggattaagcagttgttgtatttctgaataattaggagaagaaatttcatcgctccatccatccaaaagccaacgcaagcaagtatttttgccttcttctgccaattcaatcgcttgcagcaaatctccagactgcacggctaaatcaacagttaactgctgaatccaagcaaattttaaagctagttgttttttacttcgctcagagcgatttggttcatttaataagcgccgcaacaactcagtaccttggcgctggagttctgtagcttcggctatttctcccaaatctaacagcacgcgaattaaatcttgcaaaacttccagatgcaactcaggaaaatttgttgctgtgagagtttgcagtgccgttttgtaactgttaatagctttgcgccaaaaatagcgagtgttataattacctcgcccttggtaataatgagaatcacctatcgcccgatgcaattttccccaaccttctgggtgagtttcttgctgacaatgttttaatccttcctcatagctggctaatcttccctcatagccacgcttatttaaatctggattgttaaattttaaagctaggttatgtgctgccgcatgaggtaaaggaaatgtagagaaatctatcctctctactattacgtttccagctacaattcctcggttcatccaagctatgtaaaagtcagctttgaattctatggctttgtcataagatgtgatcgcttcttgaaatcgccctaaattactcagcgccacacctcggttgtaccaagctgagtagtcgtcagctttgaattctatggctttgtcataagatgcgatcgcttcttcaaatcgccccaaattagccagcgccacacctcggtaattccaagctgagtagtcgtcagctttgaattctatagctttgtcataagatgcgatcgcttcttcaaattgccctaaattatccagcgccacacctcggttgtaccaagctgagtagtcgtcagctttgaattctatggctttgtcataagatgcgatcgcttcttcaaatttctctaaattgaatagtgtgttacccctaccataccaagcattgaatacttctggaaagttgggattgatttgcaaagcagtttcaaacgaggtcagtgcttcttgatataatttgaggctatttaagattaccccacgattagtccaagcttcaggaaaattatgtttgaattctatagccctattataagaagcgatcgcttgttcaaatcgccccaaattacacagcgccacaccccggctgtaccaagctgagtcatcgtcaggcttgaattctatagctttgtcaaaagatgtgattgcttgttctaattgccctaaattagccagtgccacaccttgatttaaccaagcctctgcttcgtcactcgtcaattcaatagcatcattgaattgattacttgtttcttcttcctccgcgtcctctgcgcctctgcggttcgtttctcctccccccaaccgcctcccaatatcacccgcaacatcactaacttccccaatactcaactcacccagccgcaccatccgacttaccaattcatcatttggcttagctgaagcgaacaatctttcgccaaaaccccgcaaccactccaccaaatcaccttcattgatgtgctttgcagccaagaaaccttttgcttctcctctagtcaagccatcattgacttctgctaacaactggagaaacaacgattcatactccgcatccgttaaccgttgcggtggttctactttgttctgttccctgactggggaatgctttctgccaaataaacgcccaaaagacctcttgagccactgccaaagttgcttgagcatctgccgcaatcatgtatcgcttttatgatacattctagcaattttacggttggtcattggtcattggttattggtaagcgtttccgggatatttacgttttgtaatcacgaatagattcttgattgcaagatgaattgcgatcgcatctttgtcgcacagcagaactttctcaaataattttgaacttatggaattactcaaaacctttatcagtaatggattcaaacaattgtttaaccgttttatttgagatttttactaaaaatcaagtttaccatagaggttaagctgaaattgttcaatcgttttattttatcgacaacggcagattaaatattcgaactgtaataattgtttaaccgaattctttgtctaca

SEQ ID NO: 857 - DNA, 32767 bp, Anabaena sp.
  source 1..32767: mol_type = other DNA
tgtacaacaataaaaaagtcgtataacaaataaaaaagttgtacaatatataaaaaagttgtacaatatatcctgtgggtgcatatgcaagcatctacaggagtttttatggctagaagtaagcaagattggacgcaagccaagtttgagcgttactgtaaggaaggtcgtggtcagggcagtgggaaaaactatcagccctggatcaagattcaggactttccctccaagggtcgtgtttccagaccaccaggttggaaaacaaaccgagaacatcatctcttttctgataacgagaagcgactgttttacgtatttgagtggtcagatgcgatcgttgatattagagagcagtttcctctacttgatctggacttagcaattaatattgcggatgaaatgggtattaactatcccaaagatccgcaaagcaatacgccatatgttttagccacggattttatgctttctgtccagcaaggtaagaatatagttcagaaagcacgaacatttaaactaaccaaggatttgggaagtaagtcggtagctgaaaaatttgagttagaaaaacgttactttgctgccaaaggtattgattggggaataatcacagaaaaagaagtccctaaacaattagctgagaatgttgaatggattcatactgcttataaattagaagaaaatgcagatataaatcttgaagaattacgtaacatcgcaaatattttaaagtttagacttcaggaaagtgatgcaagtatcaataaaataacaacggttttagataaggagatgaacatagagtctggcacatctctctatctttttagacaccttattgctcggaaagaaatcattatggatatgctggtaaataaaatatctagttgtccatcttctaaagaaattcaaaaaataattttttaagctaggacgaggtactttatatgattaatgatttgtttgtaaatgacctgattgaatggattgatgaatccggtaataactttatagaacgagttctctggattgatgaaggatatattattgcctttgtttatgatataaatgctaaaacaggatttccagaggctaaaaaagtttcagagattagagaagctatttctgatggtcgtgcattgaagcttaaatcagacccgtgggcaagaatcgtaagagatgaagatttgtcagagaaagaaaaagaacttagagatagggcttggcaaataatttcatttatcgttactcaagaaccctcaatatactatcgggattatagaggtactttagttcagcaggttattgaaaaatataatgcaggtagaactgaaggtgaattagtaccaataactgtttataaatatttaagaagattttggcagaggggtaaaaacaagaatgctctcttgcctgattatgcaaattctggtggtaaaggaaagcctaaatcttctggagacaagaagagaggaagacctagaaaatacgcacaagttccagaaattggtgttggaagaaatgttacagaagaagataaaagaatatttagatttgcaactgctaaattctataataattccaaagaaaatttcttaacgactgcttatgatttaatgattaaagaatattacgctgaagatttttattacgatgataatggagttaagaaaagtattttaattcctccagataaacgacctacatttacccaatttaaatactggtacgaagtagaacaaactgatatcagaaaaactatgatatctcgtaagggttcgagaaaatatgccttagaaaatcgagccattaccggaacttcccaaatggaaactattgggccagggtctagatatcaaattgatgctacgattgcagatgtatacttagtatccctttacaaccgcaactggattattggtagacctgttatatatgtggtgattgatgtttttagtcgcatgataacaggggtttacattggattggaagggccatcttggacaggagcaatgatggctttagccaatgcagctacggagaaggtcaagttttgtcgggagtatggtattgagatttctgaagatgagtggccatgcaagcatattcctgataccattttaggcgacagaggtgaattagcagggatgacagtagaaacattaatccctaatttaaatgttcgtattgaaaatactgctccttatcgagcagattggaaaggattagtggaaagacaatttcgcattattcatgggtatgtcaaaccatttgttcctggttatatagatactgactttagacagagaggaggacatgattatcgccttgatggtaggcttaacatagatgaatttactaaaatagttatatttttgattctccagcataacaatcatgattatctaattgattatgctagagatgaaatgatgattaccgatgatgttaatcctatacctagagaattatggcaatggggaattgccaatcgttctggtagactgagaacttttccagaagatattgtcaagctaaatttaatgcccacagaaaaagcaacaattactgctcgtggtatcaaatttaaaggaatgtactacacttgcgagaaagcaaggaaggaattttggtttgaaaaatctagaagtagtttattatctaagtcagagaaatcattgaatatatcatatgatattcgacagccaaactttatttatttacgttccccaaacggtagagaatttgaaaaaggttggcttttagaatcgcaacaaagatatttagataaaaacttttatgacattgattatttattagcatatgaaaaattgcaaaatcaaaaacatcaaggtactcggttacaggcaaaagctgatctgatagccaatatagaaagtattgttagtcaggctaaagaagagactgaggcagttttagatgatactataagtaatagacaaaaagttagtggcattcgacagaatagagcagacgaaaaaaatgctcgacgtaaaaatgaagcatttgaactagcaaaagcagaaactcccaatactgataatactaagaatctaataaacactcaatctgaagattccgaggattcaaaactattacagcctgaccatatggatttactcaaacggaaaagacaggagcgaaaacgtggaaagtaatgaggaagaagttgttagtattcctaatggaaagtcagcagttattgccagatacatagaccaaaaacttccagaatataacgctaatccattgattcaggcactacctcctatcctctcagcagaagaatttatcgataaagtaacgagaacaccagattttgatgaacaagagagggagctagaagcgcactacaggtttcattgcattgagaggctatctagatattttgatcctcaaaataaaactgttgaactacagaaggtcatttgtgcgctaattatgacgggctatttagctcggaatattctgaaacctgaatatgcaagtcgctctaggcaaatttataatgcaattaaagatggaggagggaaaaacttagaaaactatgttaatcttcctacatctgcttccggcctaaccctaattggcccatcagggatgggaaagtctacgaatttccaaaatattcttaatctttatactcaagtaattcttcatcctgagtatagtgtttaccaaatagtttggttgaaggttgactgccctcatgctggttctttaaagggtctgtgtacggatatttttcttgctgttgacaggctattaggtactaactactttaaaaagtttggttcctcacgcaactctgaagattatatgctggctcaagttgcccaaattgcccatactcatcatttaggggttttagttatagatgagatgcagaatctggttacagcaagaagacgtagctcagatatgttgaattttttagtaaaaatggacaatactgtaggaattccagtaattcgagtaggtactaatgaggcttttcctattcttcaaggaaattttagaaatgccaggagagggacaggagaaggcagtgtaatttgggacagaatggtaaatgatgatgaatggtatttcttcatggaaggaatgtgggaataccagtggacaaaaactcctgttcctttctcggatgaaataaacgaggttttttatgacgaaagccagggaattattgatattgctgtcaaactttacaaaatggttcaatggagagcgatttcaataggtggtaaagaaattattactattgagttaattcgtcaagctgctaaagacggactatatttagtcaagccaatgcttgatgcaattaggtcaggggacaaggagtggatgattaagtataaagatattgcgcccctagatactacagaatatcaaaataaatgtctatctgagcttgattccaaggatttgaaagaaattcgcagattggcaagaaagcaacagaatcagcagaaagtatcgccgaagctaaattatgtaattcttgagcttttgaacttggaagtagaacctgctaaagcaaaggaatgtgcagaacaagtaattgtttctagtgatgaagatgccgaaattccatctttagtcaaaaaggcatatgctcttgctttgcaaggagggcaagtaaatgagagcctgactaagacaaatactaagaaagctaagttaaagcccaattatcaagaaaatgatattcgacgaattgttgaaaatgccaataaggagaaaaaatctgcatacgaggatttgaaattggcaggcataatcaaaaatccagttgaagattttataaatatttagcttctcaatgcttagtttcttcccaactctgtatcccgatgaactgttatatagcactttagctagataccacattcggagtggaaataaaagtttcaagcaaactgacttagagctattcggttacagttctcaacaagtatgcaaaattactttaactaataatttaaattatttagtgaaaaacttacctttacgctcccagcaaaaagttgagaatttgctacaaaatcatacgttatatcccttttacgcaacttttttaatgccacaggaggcttggttactaaaaaactcaattagtaaaaaactcagtggctccatactagatgttgctaaggtggctactaattctattggtgattcaaaaaaatttttaaaattttgtcctgaatgtttagaaaaagatacccaaaaatatggcgaaccttactggcatagaatacatcaagtacctggcattttagtttgtccaactcatggtatcgttttacaggatagttgtgtaaaagttgaatcgaaaggcgtacattatcatgctgcgagcgtagataattgtttagtagcctgcaaggtcaaaaatttgacaaataacacagtaaaaacactcttcacactggtgaatgatattaattggctaattcatagcaattttgcctttcaaggtttggcttggcttcgcgctcagtaccagcgttacttagtggataaaggtctgctacaaacctttcctggtggcaagtttaagtttgatgagtatggttttgcccagcttatatttgagttttatggtcaagaatccttagaagccatcaatcccaagttgactcaacatcaaggtaaatacttttctcactgcttgtttggatgcgacttaagcccagcaattgaccggataactcatatcttattgataaaatttttagcaaattctatagaagagttttttcagtaataatctgcatataaaaactgttaaatacattaatataaagtaataaataattaagaaaattatctttataggttggtatttcaagtattctcagattcgtgagtaaggtaaagtaagtaatatcatatttatttcacaccacgttgcatctactgaaatttggcatctaaaaatgattgttgatggcaacttacttaggcagattccctcagaatcaccaccaaagccaagagagcttttaatgtctcagttaccatatatggatttaacttttaaccttattggtgagacattacctttcgaccacggctatgagctattttctgcgatcgcccactttgaacccaaacttcatacattagacacgctgggaattcacaccattgcaggtattcccaaggatggtgtaattaatctgacccaaaattctaggcttcgtgttcggataccagtaaatcaggtacatttagtttacccattggcgggtaagtccttgagaattggtaagcatacaattcgtttgggtattcccgacatatgtttgcttcaacctgccgagcaattgcgatcgcgcattgtggtaataagaggtcatgaagaacctgaaacttttttagtcgtagcgcagcgtcagctagaacagctgggtatccaagcaaccgctagcattcccaccaaagccaatggcaaaccaatacgtaaaactatcaaaattaagcgatttacagtcgtgggttttggattagaagttacaaatttaagcaatgaagactcactgacgttgcaaatacatggtgtaggaggaaagcaaaagatgggttgtggactcttcatgcccattcaagaaaggcaatagcaattactcgaaagcagataatgaagacagcagctaaccccaaaattcagcttaatctcggcgatcctagtatgaccttattgcatcgtgctggggtggcaggactttggatgacgctcaaaaaactggaaaaaatctatccaactgctgctcaacgtattggtaattttacttggttgctaacccctagtaatatcagtctttattgggaaggacaggatttcacagttttagactggttgctgaagcattcatttcagatcagtgatgagggtttaatttccctaacagggttagattctcaaaacatggatattcaaacgcaaataattatccaccaaggtatcacagcaacttttatacaacataataaattttttaagtctgcgggtcaacaatctaagcaactaattattgatggtattcaactcagggttgattataagaaagctgcttcctatgctcatcaacattttgctaaacatttatgtgaccagtacggacaattgctacaagagccaattggtataagggggtggctttatccaggagcagtagttcgccattatgcttttaaagaacaaaccgcatttgaagaaaaagcagaatatgctctagcgttgttgttcgctcctgtggcttgtcaatattttgtgctgcgatcgcacaccgaaccatcacatacaaactatgttctggttgttcctgaagtaattgatttagaactttatgcccagtatttgtggtatttgagtaaattagattataaacattttcacgtatctagcttaggagatgctggattaaaatttattacttatgaagcaaaacaactagataatttcaattttatcaaacgatgtcaagtaatctcctttagtacaaaagcttggtcagagcggcaaaaaactcgtgcagaaatagcaatcatagaattaaattcttcagttagttatctctataaacttagttgtatttgttttcctaattgccaagttgttatatataaaaatcaacattttttgcttccaagtttaatgaaaggaataattgccaataatctagcaatgggttggccttggtgggctaattggatctcagttattaaaaataataaatcatttaaacaatttactgatgagtatataggaattaataaaatgattcaggactcagaatgggacatagaagctcaaaaattatttattcaagcttgtcatgaagcattaaggaaaatatacgccaagatttatagcagaatgaaagaaggtggatatgctcaaatagaacgagaaaatacacgcattttatctcagctaaaacgctgcaccaatgctgacaatttcagaaaatttattgcagagttttgggggagggcagggcaaatgacaattctggaggaacattgggtggaattactaccattgactacagggataggcaattggaaagtagccagggacttaacttttattgcaatggctagctatccaaagaataaaataacagaggtataggtaaaatcatcacaactatttgagctaaatcgtgagtaaacgttagattttttgatttgattaagcacaaaatattaattgtttaggtaattgttgaatgtttcatctgttcggtaacattttgactacttatggaaccgccgctaataatcgtggtgaaaatgaaggtaacacaactactttacaaaaattaatttggaaaggtgaagttcactctaccgtttcatctgaggcaattcgttgggcattgcgatatcattggcaaaatgctggctatcctgtgaatagacgttgggatgagaatgctcaaccagtagcggatcacatctgggaagatcctaattttgatgatattcgcttcattgatgatgatgtgttgggatttatgcaagcggaagcggcaaaagttgaagcagcagatgaatccgaagttgaaatccagaactcaactcaagatgagaaccaaacaacctctcaaggtgaggagaaaaaaacctcacaacgtaagcgcaagcaaagacctaaagggagaataagtgctagacgaggtgtattagaagtcactcgtgcagtatcaacaattccttatgctggtgatattactttcaattctatgagtggaaagaaaggacgaacatctctttatgctacagaagttcacgctactcggtatcaatatggctttgcattaacacccaatagactcaaagataaatctcgcattcatgctgtcttagatggcttaatttcgattggagacgtggcaggaaatcacgctcgtttcttttatgatttttctcccgatagcataatattacggtggacacatgatttctcacctcgcttactttactgctttgaagaagatgaacttagaaatatatcaacacccgatttagtgcgacgggtagaagctggagatatagaccctaaagaattatggataggaggggcaattgctagcactctagaaaatttaggggccaatctttttcccggagtgaaggcaacagttgaagcattaaaacaggtgattattgaagatttgcagttgtcgttaaggagttcatgatatgacgacaattgttgtaaaagtagaagttcccatagcttgttttcgccagtctcatgctagggaatacgctgaaacctaccctgtaccaccgccatcgacagtatatggaatgttactatctctggttggagaagttgatagatacaaacactgcggcgttaagctggcgatcgcacttctatctaaaccagaaaagtcaactgttattcgtacctgccaccgatttaaaacgaagaatatccatgaatctaaaaataataaacctgattaccaggatttactaactaatattgagtttgtagtttgggtagatgctggggcagataaagccaaaccaaatttagcgcaacgtttagaagaggcatttactaacccagcttctattaataggtttggtggattatgtttaggtgaaagtcgggatttagtgaatgatgttagcctgttacctgaaaattactatgcagaatcaatgcgatggttaattcgagatgattatgggttactaaccttaccttattgggtagatcatgtaggttcacggggaacgcgatggctgtgttacgaaattcaggaatttcaagtatttcaaccacccgaattatcttggacttcaattcaaagtgattagagggcattatttacttttgcaagcatctttgcttgggcaatttaaataccacaataaataatcttgtcttcttgtttcacaagcattttagggatttcatatactttcaatgtgcttgcaatttcctggaacaccttcaaaacaagggttagagctttagcaactttgcttttgctatgaatagctattaatttttgcaacttgactaatcctaattggaaggtgcttgtaaaattagtacagagctttggctagtcaacaggtttgatgatcgccgtgctttaacattagatgtcgttaggcgttgagcagtgattaacctgaaggcttgctccgggatgttgtaggtgctttaacattagatgtcgttaggcgttgagcagcaccggtaccgcgagtagtcgcaccaatattcatatgtgctttaacattagatgtcgttaggcgttgagcagttgaatgcgaagttatcggcagatgttttgttgttgtgctttaacattagatgtcgttagacgttgagcagtgaccattggtgtatccatcaatcctgactgctgcgtgctttaacattagatgtcgttaggcgttatctacttttgatacaaatacttttgaaatacatacaaaactagctctgccaaatatctccttttcaagacatttttgcgattattttttcccactgctcaatctggttctgtagttgtaattgccgatcgcccaaatcttgactatcatcaacagacaaatcctgaccgctcaatcgctcacgatagagagcaatcagttcggttagggcttttttattgcttgctgatcctcctgggtcagagaactaacattgactggaatcaactttctgccaattctctctacaaactcagaccgacttaaatccatactgtcggcgatcgcatctaatccatcaatcccggtaggagttagggctaggttaactcgtttcttcacctcatcgtacagttctggtacgtctttttgacctttttgccctttcttacccattgccgtctagtttttgctttcctcccaatcatagtaaacacatttagcacttaagttaaacattaaaattttttccaatactttaggtattgtgtaatccctaatttagttagataatacaggcattgtgtaatgcctaagcaggcatctcgtaaggatatgagtaactaattgcaccgtttgattcctcaacatctcaacggcttaattttcatgggcaagcattaattgcttcgtggccaattcagattaatcaaaatctgccagatgatttaggcatttttcaaaactatatggttagtttcttccctaaaccttatccagatgaaattttatatagcgtcattgctcgttatcacattagaagtggcaatacgagtcccaaaattacacttcaagagttattcaattcacaaactactgtcgcaacagtagatttaccatcgaacctgaataatttaattcaaaacctacaatttatctcaaattaccaagttgaagatttgatatataaacatactctctatcctttatatagcccttttttacctgcaaacaggtctagtcaggtactggaatctatgaaaggagattatgggggagatattcatacaagagccggaattatggcaagctcaattactatgccaaaatattttcggttttgtccaacttgctgggaagaagacttaaaaaattatggcgaaccttactggcatcgcatccatcaaataccaggggttttagtttgtccatttcatgatgaagttttgcaagatagcctagctcctttacacggttttaataagcatgaatattatgcagctagtacagacaaatgttctattactaaagaaccaagtatttttagccctgacacgttgaaaaaattactggtattagctaaagatttttggtggttactcaatagtgaaataccttgccaagaaccacagtggtttcgcaaacagtacaccaatctgatgattgagcagggtcttgcaactgcaactggacgaatttaccagaaaaaactactagataattttttgtttttttatggtcgagaaatgctcagtgccgttaattcaatagtcactcataatgattcaagcaactgggttactagcattgtcaggaaacataggaaatctttccatcctcttagacatctgctgatgatgcgttttttgaaaacatcagtagaggaatttttcaagcaagataataaatacaagccttttggtgaacccccgtggttgtgtctcaatgctgccgcagagcattacctacaaccagtcattaccaatttagtcattactttatgctgcgatacaaaaaagcctgttggtactttttcttgtacttgtggaatggtttattgccggactgggcctgatgaaacggatgatgacaaacttcgcattggtaaagtaaaggcattcggtcaactatgggaacaaaagctgaaagaatttgttgaagttgaaaagttgggtttgcgggagacagctagaagattaaatgttgatcccggaactatcaaacgctatgtatctctgctaaaactgaccacttattggcagactagaaaggaaaatggctctgtagacttacaggaagtagcagaaatacaccccaattctgcaactgaactcaaattgaaacacaggcaagattggatggctttacaagcacagaatcctgacgcttcaaagacaactctgagaaaactagcaccagccacctatatttggctatacagaaatgatagagaatggctcaatcaaaactcacctgcattacaagttgctgttccttccgttgtgagagttgattggcaggaacgagatcggcaaattctcgcccaggctcaagacgcagtgcgatcgctaattaacgccgatacgccagaaagaatttctattagtagggtaggaaaaactatcggcttactcgccttactcgaaaaacacctcgaccaaatgcctttaacaaaggcttacttagaatcagtagttgaaactgtagaagattttcagatgcgccggatcaagtgggcaatcaagttgcttgatgaatgtggagaagaaattatgcgctggaaggtagtcagagttgctgctttgcgggaggattgctctgaaagagtcaacgcatttctggaaaatgaacttgacaaagcgtacaagaaagagaggtgattccattcacctctccaagtgatgagataaatgctttgtgtgttatgctgcgtcggctaccagtaagccattcacagcgacgatgatgatttgcgctgccaaaggagtgtcacaacgtagcttatcgtcactattacagggttgtgctatccattgaccctccagattttggtagaaagtgccgagaagttgggaaccattccaaacacggtaaagttcaccaaatacctctgataccgaatcaatctcaatttccggtgctatttcctcacctagctgctcaatgtactcctcaaactctaattgagccaaggcttggttatcaaattcatcctgtacaatcatcatgagtcacctcgttaacggggttgaacaaaaggcgatggcgtaaaacgcccgcctaaaaggcgatcgcatttctcttgccggagggcgatcgcctttttgatttcagattttattttagctactatagtggctatatacaatatatgtatggaaaactttattcagtcacttccactgtgctaagaaaatcctttaaagaaatgcctaaagccaagcaaatagcctctaacaccttgatagagacactttcagactcgccgtactctagttttttcaggttttggtgagagcattccccacccttagcagaaatttcctctgccaatttctgccgggattttttaccacgcatacgctttaaaactgctgctctatctttattccagctaacggccacaacgtctgaaacataaatatacattttagtttctctattcctctcattgttcatataatagctacagcagtaaacaaaagttattaatttcggctactacagtttacaaattatgggttagaggtaagcgatcgcagttaatcaagttttcctgtcagtcaaaagagagtaactgtttttgctatgaataccacttgtgcatataatttcaaaggttctcccagaacaaatacattagccatctacagcatctagagccttgacacccgaagaactaaaacagcttgaagacaccctatggcagagtgcagataccctgcgggctaactctgacctcacatcgaatgaatattcgacccctgtaatgggtttaatatttctcaagtttgctgataataaatatcgtcagtatgaagcggagattttacaggcttatgaagcattaaaagggactcgtagagagaagaatatagaagaaatagctattgagaaatgtggtttttatttaccaaatcacgcgcgttatgactatttattaaacttaccagaagaggaagatatagctaaaaaaattaaagaggcgatggagtccatagaaaattataagccagaactcaaagacacattgcctaaagatgaatatttccgcctcactcgtacagacaaaggtattcctaaacaactattaaaaaatttttctaatattcctcaaaacgccactggggatatatttggacgaatttatgagtattttttaggtaattttgcactttcagaaggacaaggtggaggtgagttttttacaccccgttctgtggtgcggctaatggtagaaattattgaaccattaaaaggtagagtatttgatcctgcttgtggttctgggggaatgtttgtacagacaggacaatttattcaagaacagcaagaaaatcaaaatcagggtgtaattaatgatttatatgtttgtgggcaagaaaagagactggaaactgtaaaactagcaaaaatgaacattacagttaatgggttaaggggagaaatcaaacaagcaaatacgtattatgaagacttgtttaatagtcttggcgattttgattatgttctggctaacccaccctttaatgtggatgatgtaaatctgacacaggtggagaaagacccgcgatttaatacctatggtatcccccgcaataaaacaaaagttaaaaagcaggatgagggtaaacaaacagtacctaatgctaattatctgtggattaatttgtttgctacatccctaaaacctaaagctagagcagcgttagtaatggctaactcggcttctgatgcgcgtcacgcggaagcagatattcgccaaaagctgattgaagagaatttaatttatgggatgcttgctctgccctcaaatatgttttacacggtgacgctacctgcgacattgtggttttttgataagggcaagaccgatgataagattttgtttattgatgcccgaaatatttttacccaggttgacaggtcacatcgagaattttcagcagaacaaatcagtaatctggcggttattagttatttgcgtcagggtaagcgacatcggtttattaagttgattaatcgctattttcagcaaggaatggcgaagttaaaagaaaatcaatcacaggtaaagcctgtttctcagcaattaatggctgtgttgaatgatggtgcagatgatgtcaaagctagggaagttgctgttaatttcctcaatttgtgggatgaggtaacagatttagaaattcagtatcaaggttatttagataaatataattatcctggaataaatattgatacccaaaatgaggcacagcaaaaactaagtgccgcatttaaaccgttttttgataatttccatgttgagctaaaacagcttgataagactgtgcgcgctcgtgaagcagagctaaaggagaaagcaaaggaagcagaggcgaagaaacgggggcagattgataaacaaattaaggaactgaaaagcactttggaaacgctgcatgaggaggtaaaatcagcagaattattttttactcatattcgctggttacaggaacgttttcctaatgcaaaatatgaggatgtgacagggttgtgtaagttggcaactttggaggaagtgaaagaacaggattattcgttaaatcctgggcggtatgtgggggtagtgattgaggaagatgggaaaacggaagaggagtttattgaggagattttaggtttaaatgaagagttggaaaaattaaatcaagatgtgcatttgttagaggggattattgctcataatttacgtgagatagcgggggatttatgagtgattatttaaatcaatttcagaaattagatgaagtggggactattgcaagaggtaaatcaaaacatcgcccaagaaatgagccatcgttatatggtggaaaatatccatttattcaaactggagatgtaaaacatagcaatctttacataactgagtattcccaaacatataatgaaaaagggctatctcaaagtaaattatggcaagcaggtacattatgtataacaattgcagctaatatagctgatactgcgatattaaaatttcctgcgtgctttcctgatagtattatcggatttataccctacaaaaataaagctgatgttcgatttatcaaatattgtttagatacatataaaattcaaattcaggcaatttctcaaggcacaacacaagacaatttgagcgtagaaaaacttttatcgcttaaatttagaattccattaatttccattcagaaaaagattggggcgatactttcagcttatgatgatttgattgaaaaaaataatcgccgtattgccatattagaaaaaatggctgaggaaatctaccgtgagtggtttgtccgtctgcgctttccgggacatgaacaggttaagtttaataaaggcatcccggaggggtgggagagaaaaagattcgatgaattttgtctactccagcgtgggtatgatctaccagatgctaaagtaattcctggccaatatcctgttatcgcttcaacttcaattaaaacgtaccataatcaatttaaagttaaccctccagtaattacaactggtcgctcaggctctcttggcacagttttattcatcaatagtcaagcctggcctttaaacacgacattatttttaaaaaacttttatggtaattcaccatacttaatttactacacactaaaattcttaaaactggaaaattttaattctggtgctggtgtacccacactaaacagaaatcatttgggtggattgtatatgtctgttcctcctaaaaacttgcaaaataattttactgacaaaatagcaattatttttaaacagaaagagcttttagttaggttaaataataaacttgttgaaacacgcgatcgccttctcccccgcctcatctcaggtaaactttccgtcgaaaacttagacatccaattcccaccgagtatggctgacacaccaccataaaagtaatactcagtgtttatcctataaagtcagggcagatattgacaaatttaagcagcaatgggctaaaatttgtacattgatggactaataatatcaaaaacagcctatagccgtgtagtttgcctaaactatgcctaactttatctctgaagatgacatcgaacaagcggtactccgcaaattagagcagcagcacggttttaaattactcaactgctacaccccaaaccctgacgacctcaacgacagttcaaaccgcacagataaacgagatgtcatttttagcgatcgcctgaaagctgcggctatacgcctcaaccccaccttaccagaaacagccatagatgaagctttaaaaatcctcaccagtcaacgtcagtctatgtctcccatcgctgcaaatcgggaaatagacgggctgattcgtgacggtatccccatacaatatgaaaatgcccaaggtagaaccgaacccatcaaagtacgagtaatagattttaacgatttcaggacagatttcaataatgaatatttagccgtttcccaactgtggattaaaggagaaagaaattatcgccgtcctgacatcatcctctacatcaacggtttacccctggttttcattgaactgaaaaattccaacgtcaaattacaaacagcctttgacgataacctcaccaactacaaaaaagatattcctcaactcttccttgccaatgctttctgcattctttccaatgcactagaaaccaaaattggcagttttaccgcagactgggaaaacttctttaactggttacgggtagaagatgaaaaggaaaaaataaatcgtcagcagattcaggaatctggtactagcctagaacgagccatagatggtctttgtcaccctgccaaactcctagactacatcgagaattttattatttacagaagtggaactcagaaaattgtcgcccaaaatcaccaattcattggtgtgaatcgcgcaattgatgcctttatccatcgggaagaaaaacaggggaaattaggcgttttctggcacactcaaggctcaggaaagagcttttctatgattttttatgtccgaaagatttcgcgcaagctcaaaggcgattttacctttgtggtggtaacagaccgggacgatttagacgggcagatttaccgcaatttcttaaacaccgaaaccgtccaagagaaagaagctgctcaacccaaaaacagtaaacaactgcgggattttctttctttcaacaagcggatagtttttaccttgattcaaaaattccgctacaaaaagggcaagaagtatccaatattgagtgaacgtaacgatatcatcgtcattgttgatgaagcacaccgcacacagtataaatccttagcggaaaatatgcgggcaggtttacccaatgccaactacctcgcgtttacaggtacacctctgttaggtaaagaacgcaaaactaatgaatggtttggggattatgtcagcgaatacaacttttctcagtcaatagatgatggtgctactgtccccctgttttaccagaagcgagtaccagaggtactgattcaaaacgagaatttaagcgaggaattttaccaaatactcgaagatgaaaaccttgatgatacgcaacaagccaagctagaaaggaaatttgcccgtgaaattgaggtcattaaacgtgacgatcgcttagaaacagtagccaaagatatagtttaccactttccccgtcgtggttatctaggtaaaggtttggtagtttccgtagataaattcactgctgtgaagatgtacgacaaagtacagtatcactggaaagcagaaattaaaaatttagtgggacgaattaggaaatctaataatgaaatcgagaaagtgcgcctcaaaaagattctcgattttatgcgcgaaacagaaatggctgtagtgattagtttagaaggaagcgagagcgaagagaaaaaatttgctcaacaaggactcgatatcaaaccccaccgaaaaagaatgaatacccttgatgctcaaggtcatgatatcgagtatcaattcaaagattcagaaaatcccctgcgcttggtgtttgtctgtgccatgtggttgacaggttttgacctacctaccttgtctactctctacctagacaagcccatgaaagaccacacgctgatgcaaactatagcccgtgcaaatcgcgttagtagttatcagattaataatgtcactaaaaccaacggcgagattattgattactacaatgtcttccgtgatatgaaaaaagccctagcagcttacgctttgggcaatgatgaaaactccctagttccagaaaaatctgacctgtttaaattacttgatgatgcgatcgcgcaaggactaaacttttgtcatgaacgaggcattaatctagaaactatccttgccagtcaagataccttcaagaacttagagcagtttaaccagtttgccgacaccctactgcaaaaagatgaatggcgtaaagcctttgtggtttatgacaataccattacctcactctacgaagcctgtaagccagagatattaaaccaaccacgccccctggtgtcagtttttcaatacttacgaggagtcattgatagtattatcgagcgcaaagatattggtaacgtcagtttaaaaattgccgagttattagatgaaagtatagtcacagatgatcaaggagtgaccacacaagagtatagtgcgaaataccaaattatccagaaaggtgaagtttgggatttaagtaaaatcaactgtgagcagctaaaagccgaatttaaacacaaaccctataaaaatattgcaattaccgatttaaggagcttcatcgaagacaagctcaaccgcatgattcagcaaaatactactcgtacagactttgcccaaagactacaagcaatcattgacaaatataacgctggtggttcatcaactgagaactactacgaagccctggtaaactttgccgaaaacctgaaacaagaagcagaacggcatattcgggaaggcttgacagaagacgaactggaactatttgatttactcaagaaagacaaaatgactgcggatgaaacccagaaagtcaaattagctgccaagtcccttttacagcgactcacagcagagcagccaaaagttttagtgcaagattggtataaagatatgcagagtcaacgcagggtgaaatccgtagtggaagcagtcttagatcaaaatctgcctgaaagctatgatcgagcgttatttaagtttaaatgcgacacagtatttgatttgatctatgaccaggccagtaaaggtgcaaagtgggcagtctgagtaatggaaactatgtctatctatgaacgcgatcgcatgaagacgaaaatcagatttatgagatttgtacggctggcataatttatcactgctttcgacttttcaagtagctctacttaagcgataattagaacttgaagacacatgatgactataacaaaatgggccagcatttatacgctttacttgttggtatcgacaactatcctgaccccaatcatcgccttcaagggtgtgtgaacgacataacagtaatacaagagtatcttaacgaacgggtcgatcagcagcagtatgaactgcattcattgatacttaaaaatagtgaagccactcgtcaggcggttattaatggcttccgcaaccatctttgtcaagctcaacaaaatgatatagttctgttttactacagcggtcatggttctcaggagttagcaccgaaagaattttggtatttagaaccagaccatctggatgaaactttagtatgttatgacagtcgtactgagaacggctgggatttggctgataaagaattggcactactgattggggaagtcgcagaaaacaacccccatatcacaattattttagattgctgtcactctggttctggtactaaagatcccatgcagacagctaaggaacgtcgcttccccacagacaagcgatcacgtccattagatagctttatcttttccctcgacgatttagagagactttcagatacccacaaccccgaaaaacacccgactgggtggaaaatccccagaggtcgtcatgtacttttagcagcttgtcgagaccacgaaacggcaaaggaatactatggtggtggccaacaccggggtagtttctcctatttcttactggataccctttctaaaactaacggaaaactaacttatcgagatttatttgcacgcaccaacgctattgtccgcagtgaaattacagaccagtctcctcagttggaagtaaatgatcctgaagatgacaataaattttttctcgatcgcgtgatcgctgaacatgacccctattttatcgttcagaatcacagaacctacggatgggtaattgatggtggtgcagttcacggagttcaagcacctgaacatggagaaactactttactagcattgtttccctttgatgccaatattgatgatctacgtgacccatcgaaatctgtgggtatagcaaaagttactcaggtactaccaggtaagagcaaaatagatattgaaggtatacaaaacttagctgctgataacacttttaaagcagttgtgacgagtctacctctaccacctttaggagtgtactttgagggagatgaggatggtgtcaccatagcaagggaaaagctgagaacagtgggtaatggtaagtctccatcaccatatctccgcgaagagaaagaagctagtcaagctgagtttcgtctgttgtgtcacaacaaccaatatgtaatagccaaaccaacagatagccgacctcttgtagaacagattgatggttacacaccaaaaaatgcagaaatagcaattaaacgcctagaacatattgcccgttggacaacaattgctaaactttcaaatactgcggcaactcggattaaagctggtgatgtgaagatggaacttatctttgctgatgaggatttaccacaatcaaaccagatgcgtttgccatacaaatataataatggaacatggcaacgaccagaatttagacttaaactcaccaatacgacgaaaaagccacttttctgtgctttagttaacctgtcagatagtttctccattagtaccccgttttttgaagcaggtagcattagactggaagcagaacaggaagcttatgctttagatggagaagaattgcaactagaagtcccagacgagtattgggaacagggtatcacggagtacaaagacattattaaattgattgttagtaatgatgagtttgatccaagattgttaaatcaaagcaaacttgatgctcctcggcttaaagcaatagataggaattatgcaaatcaaagtagtcttgatcggttgatggatcgtactcaaaatcgagaaattagagcgaaaagtgacgctgttagatttgatgattggtacgctgaagaaatcacaattactacagtccgtcccctgcaatctacaccagtttctcagcaacaagaacaacaattaggcgcaggggtaagattacaaccacatcctaatttagtggcaaatgttagcctcacaactataccagaagtgagccgagatttgggtaacaacattgtacctcctatcttgagagaaaattccgaagttattcaaccgttccaatttactgccagtcgtgctactgaccctggattaagtgtattggaattaaacgatattcaagattacaaagttgttactcctaatgcacctctaaaattatttgttgatgcaccactagcagataatgagtatattcttcctatcggctatgacggagaatttttcttgccgttaggtcgtggtcataaaactttacatggtcaaacagaaattgagatagaacaattaccagccccagttagtcaaggagagaaaagcctacaaggttctattcgcatcttttttcaaaaaattatcaaccaaaaattaggaaaaaaatataactatcctctactcagagtagtagaagttaatgataatcaacaagttaattatctaccagatgaggtaactattaaccgagttaaggaagcaaaaagaattgctgtttatattcatggaattattggcgatactgaaagtttagtggcaaccatcaaacagcctatattacaaccagacagacaaacagtttctatcagcgaactttatgatctaattcttacctttgactatgaaaatctcaacacttccattgaaaataatgctcaatatttaaaaaagcgattgagagatgtaggtctgggagaaaatcacggcaaagaattacatattattgctcattcaatggggggattggtatctcgttggttcattgaaagagaaggaggaaataaagttgtccaacacttgattatgttgggtacaccgaatgcaggttctccttggccagttgtagaagattgggtaaaactcactttaggtattgcacttaatggtcttgctatcattgcttggactgcaactgtggtagctggactaatgggtgctttagaaagaaatattcgggtagcattagcccaaatgaacccagcttctgattttctcaattctctagcagccagtgatgaccctggtattccttactcaattattgctggtaatacttctatgattacatctgttgttccagcagcattagagcaacaaccagagaaaaattctagtgtgctagaacgactcaagcaaagtttatttaatagagttgtagctttaccttttggtggtgaaccgaatgatattgctgtgacggtggaaagtattaatagcattcctcaagggcgatcgcatcctccccatattcaagaagtaccttgcgatcacttgagttacttcctgaatcaacctgatgaagttgggttacaagctttgattgcagctattacgaatcaagaatattcttatggagagttacaaaaaccttataaagatcaagaattacagggactttatgaaggattacaagatttatgggaaaaacaagaaattcatacttgttctatttgctcgaattttatcacagttaatcaaaaatttgaaggtgctagtaatgttgagtctttcattgcgaaaaacagaaaaaaagtggaaaatataattgttgaaattaatagcacatattcggcaaaagaaataaaagataacttacatcaaattgcaattatagggttctacagaagtaacagtttccgttcgttacctgcaattatttcccaaaaagataattttttacaaatcgagcttgaagacatttttagctttttagatcctaaagaaaatcaacaaactgaaaatattccatctttttcaacagagataattttgtttgccgtttactatcagaaggagaataaacatggatactaagaaagtagaagaggtaaggaagacaggatgtactcttattgcttttaaagatggtaagtatgaaagagcagcatctgaagattttaaaacagaagctgacatagttattttaattcatggctttacgagtcatggagaatacatgggtcaggaattagtaccttatctttatagtgaaaattatcaaatcttcttgtttaattatgattcttacaaaggaatattatctgctgtaaggagtttacaagaattactggaaacgtatgataatctaactaatcaaaaaatacgctccaagaaaatattccttattgggcatagtatgggtggtcttgtagctcgtcaatttactatagatgatgcaaagaaggacaattcagataggtttataaaaggagtgatcatgttggctactcctaataatggtgtattacaaaataaattaagtaacgaaaattggagaaattttgttaagtatttaatatctgtttcagaagaaataggcggagtattcccacaagccagaacattggagtgcgtcgcggtaaaagaacttgctaaaattgatgagtataatattattgataaattgaattacgaatgggaaaagatgagttgcaatttgccaccaagtttatctatatctggtggacaaaattatcttgaattcactaataaattaattgaaggaataattaatcgtggaattcagcaattaatatctgattctaatacccgctgccctaatgatggaattgtgcttgaatgcagtgttgatatgaactcatgtattagctatccccaacaaaatcaacaatatatacacctgaataattatcatgaatattcaaataccaatcacaatacaattcatatccaacaaatagtatcaattaaaattgtagaatggttacaaacaatcagcaaaaaaaatacgagtttactaaataacgcataataataaaattgattgtagtgcttttgaatttttagagttaacataacaattatgtctaaacataaatttaaccttaattttgctattattatcggtattaataattatcaaagcgggatcaaagagctagaaacggcagttccagatgctattaaacttgctgaaattctacaaaagcagcatgatgctctaaaaccacaatatcaagcacaaaataaatatgaagtgcaattatttttaaatcaacgcgctggtcttaaacaactgaatcaattaattgcagattttaaacaaggtcaaataccattagacagaggtaaagttacagttacagaaaatgatcgcctccttttttactttgctgggcatggaattgctttagatgctctagaaaatcaagaaggcccagtgggttacttaattcctcaagatgctatatcaggggatagcagtacctacttgccaatgcaggaattgcatgatgctttaaactcacttccttgtaggcatatgttagcaattcttgattgctgctttgcaggagtatttcgttgggcaagtctaaaaagagaaattgtgcctaaagtaaaagtatataaggaacgctacgaccgattcattagcgatcgcgcttggcaagtaattacttctgctgctgatgaccaaacagctttagattctttaggttcacggggtatggtcacagaggggaacgaagttcattctccctttgccaaagctttgtttgatggtttatttgggaagggtgcagacctaaataaagatggtatcatcaccgcaactgagctttacttgtatttaagagatcaagtcgaaatccttacagaaaataactacaagcggcaaacccctggtttgtgtccactgaaaaaacacgataaaggggaatttatctttttgtcgtctgaatttgaccgaaataatttggaggatgcaccgccactaaatttagaaaataatccctatcgaggattagaatcctatgatgaaaaacacagtcatttgttctttggtagagaagaacagattaaaaagctttaccagaaagtagttgctaacaaccagaagttaacattagttttgggtgcttcaggtactggcaaatccagtttggtgaaagccggacttattcctaaactcaggaaagataaaacttggtttatcctacccccttttcgaccaggggagtctcctttcaaatcattgaataacgcactagaatcggttaagcagcctttgattgctgcttcctcaacgacgacaccttctcgtttgcttaccccagccgaagaaagccttgcaaattggtttaataatcatcctcaagcaaagctactggtggttattgatcagtttgaagaactgataactctgtgtaaaagtgacaaagagcgagagcaatttgagcaactgattaaaaatgcaattaccaaatatgccgacaaaatccatgtagttatcaccttgcggcttgactttgaagcacagcttcaaaactctgtacttgaaaagttctggaatgatgagactcggtttgttgtcccaccaatgagccagaatgaatttcgggaagtgattgagaaacctgcactagaaaaagttatatattttgaccctcccagcttggtagatgacttgattaacgaagttgtacaaatgccgggtgctttacctttgctttctttcaccctcagtgaattgtacttgaaatatttgcaggagcggagagataaccgggctttaacgaaagaagattacgaacagttaggaagagtagttggttctttaaccaaacgagctaatcaggaatatgatcatttaattcaagaaaaccccgcttatgaaaacactgtacaacaggtaatgttacgaatgatttcattgcagggtagggagtcagcacgacggcaagttcctaaatcggaactggtgtatgccaatgaggaagaaaataaacgggttcaaagaattattaaatgcttttctgaagctcgcttaatcgttgagggttctaattctcaaggtgaaccttatgtggaaccagcacatgatgctttagtacaggggtgggttaagttacaggagtggattaaacaagagcaacagaatttacctttacaacgacgattgacattagctgtccttgagtggaaaactaagaaacaaagccaagataggcaagaagcaaagttcctttggaatgccgatccttacttagatgttttaaacaaaatactcaattccagtgacaattggcttaaccaagtagaaactgagtttgttaagtgtagcaccaacctcagagaaaagaatcgtcgcattagaatgggcttggttgctaccgcattctcttttatctccatattttcttttatacaatggaaacaaaatcaagaagctcagagtatcaacttgagtgtatcttcaaaaactttatttgctgctgatcaacaaatagaagcgttagtagaagccataaaatctgggaaaaagctcaaatctgtggttataccagaagcaagtaccactcaccaggttgtaacaactctatatcaattagtttacagttcgatagagtataatcgtttgcaagaagaaaaaggattttatcgtgctagttttagccctgatggcaagatgctggtttcagtaagtcaggacaatattatccaattgtggagcttagatggtaagaaacttaagaaaaattttaccagtaatctttcaagtgtagatagcatcaactttagtcccaacggcaaaatgctggctctggcaggtaataatgataattttatcgaattttggaatctggatggagaagataaacccaggacgcttaaaggaaaactttcaaaaacaaatagtgttagctttagccccgatggtacaatgctggctttaggaagtaacgacggcatcatccaattatggaatttagatagtaatgaagttaaaacttttactactaatcttaaaataaatagtgttagctttagccccgatggtacaatgctggctttaggaagtaacgacggcatcattcaattgtgggattttcgtagcaatgaaatcaaaaattttaatagtaagtataaaataaaaaatgttagctttagccccgatggtacaatgctggcttcagtaagtacaggaatcattcaattgtggagcattcaaacaggcgaaaaaatcggtgcgggaagggaactcgtaggggatgtggattgggttagtcgtgttagcttcagtcaagatggcaaaatgctggcttcaggtggctataacggcattattaaaatctgggacactgaaacaggtaaagaactcttaagcatccaagggagtcgaggtaggactggtgcgtcaattatggatatcacttttagtcctaacggcaagatgttagcttcagtagatgatgacaagtttatcaagctctggaatctgaatggtgagaataaatccaagatgctcaagggtcagctttcaaagataaggaatattagctttagccccaacggcaagatgttggctttggctggtgatgataagtttatcgaactctggaatctagatggacaggataaacccagaaaacttcaactacaagtttcaaagataaggagtattggctttagccctaacggcaagatgctggctttagctggcgatgataagtttatcgaactccggaatttagatgaacagtatgaacagtatcaacctggaaaacttctaggacataagtcacgtgttaatagtattagttttagccctgatggcaagatgctagcttcagcgagcgatgaccagacaataaaactatggagtctagatagaaacaaagaacccacaactttaaaaggtcatagtaatttggtcaattttgttagttttagtcctgatggcaacttcctagcttcatcaagtaaagaccacactatcaaactctggagattgaaagacaataaggaagtctggagtaagaaaattgggtctggttctggtggccaaacctggtgggttggttttagccctgatagcacaatattggcttcggtgggttcttacaattttatccagctctggaatctagacggtaacgaattcagaaggcttagaggtaatctttcaaatatcaatagtgtagccttcagtcccgacagcaagatgctagcctcagtagaaacgacagaagattcagtaggtaaagcagaggaaagcgtcatcaaattcttaaacttagaggggcttgaattcaataggctcaaaagccaatttgtagatattaataccatcagtttcagtcctgacggcaaacttttagctgtaggagttgaagatggcactgttatattacacaacttagatttagataatttattaagacgcggatgtcattggatacgtgattatttgcgaaataaccctaatgttagtgaggtcgatcgccatctctgtgacgatgtaccaccaattactacaaatcctgagaattaggtgagttaaaagcgaactgcaaccaccatatgtccaaatccaagtacgaattttaccgcgaccttgcagtaatcattgggattaataactactcaaatggtattccagagttagaaacgcctgtcgctgacgctgaaaaattcgccaaaattctccaagataattatcaatatgaggcgcagatattactaaacgaaaaagcgacattgaaagagttaaattctctactggaggacttcaagcaaaaaaaattacgcctaccagataaaactgtacagatagaagaaaatgaccgcttaatactttactttgctggacacggaatcgtcctcagagatgggctagaaaatacggataatctggaaggatatcttgttccccaagatgctagaggagatatcttgttgcaaaacaatattcttctacctatgcaagacttgcatgatgcactagcacaattaccttgccgtcatttgctaattatacttgactgctgttttgctggggcatttcggtcgagtttgtatagagaaattgtacctgcacgaaaagtttataaacaacggtacgatcgctttattagagatccagcatggcaagcgatcgcatctgcggctcatgaccaaaaagctattgaccatctaggttgttttggacagagaggaagcaaaggcaaacactctccttttgcaaaagctttgtttgacggtttgctgggtgctgctgacacaactctaagagaaggtgatggtattatcacagcaacagaactttactgttatttacgcgatcgcgttgaggaactaactgataaatatgacaaacgccaaactccaggtttatttcctctgaaaaagcatgataaaggcgagtatatcttcttgcttcccaacttcgaccaaaacaatttagaagatgcaccagcactcaagcaagaaaacaatccttatcggggtttaaagagctatgaagaagaacattctctcctgttttttggtagagatgaacttgtcaaagaactatctacccatgtttctcaaaccaataacccactcaccgtagttttgggtatttctggttctggaaagtcgagcttagtgaaagcaggactcattccttatttacgaaaacatcataaccaagaatggtacatcataccaactattcgcccaggagataattctttcacttctctggcagaggcacttgtagaaaagtctgaaacagatggaaattacttaaacaaaattaaatctctaaatcagacattaaaacaaataccacaggattttattaagataatacaagaattactactaatacctgaaaaagtaaaaattttattagttatagaccaatttgaagaactaatcacagtttgtaatccacaagaaaaagaacaatttttaaatttccttagcagtattttagaagctcatcctcagcaaatttccattgtattgactctgcgttctgactttgaacctcggtttttagattctgctctgaaagcatattggacacaatctcgttttcctatacgagctatgagatccgatgaattacggcaggcaattgaacgacctgctaacgaaaaaatgctcgattttgacccaccaaatttagttgatcagttgattgacgaagtggggcaaatgccaggagcattgtcgctattatcttttacattgagtgaactatatattaaagccataaatcgagaaagcagaactttaagtaagactgattacgatacattaggcggagttgcaggttcattaacacaaagagcaactcaggaataccaaacattagtgaaacttgatccagcttatgaacataccgtccgccaactcatgctgagaatggtagctattgaaggtaatgaattagcacgacgacgagtaccaatgtcagaactggagtatgagagtgtagaaaaaaatcaaagggtgtcgcgggcgattgctcagttttcggcggcacgtctaattgttgaaggtaaagaaactggtgacgaaccttatgttgaaccagcacacgatgccttagtaagcgggtggaacaaactacaggaatggaaaaatgatgagcaaggaagtttagttttgcgtcaacgcttaacaccatctgctaacgattggctaaaagatgggcgcaaatctgattatctatggattcgtgatcctcgcctcgctatcctggaaaaagtcctggaattgccatctgaagaaaactggctcaatcagctagaaacagaatttgtgaacaccagtattcagaaaagaaaggatgaacttgaagaaactaaagaacaactccgcatttctgaagagcgtcgtatcgaagcagaaaagcaaactgcgatcgcgcttgctagaaattctgaagccttactatcttctaatcaacaattagaagcactga

SEQ ID NO: 858 - DNA, 32767 bp, Nostoc sp.
  variation 32400..32767: note = n is a, c, g, or t
  source 1..32767: mol_type = other DNA
tgtggaaacataataaagttgtacaataaataataaagttgtacaatgcctaataaagttatacaatttctcctatgggtgagtataattccatctgtaggagattgtctttatggctagaaccaagcaagagtggacgcaagctaagtttgagcgctacatgaaggaaggtcgaggtcagggtagtggaaaaaattatcaaccgtggataaaaattcaagattttccgtcgaagggtagggtatctagaccacccggttggaaaacaaaccgagagcatcatctgttctccgatcatgagaaacggttattttatttgtttgagtggtcggacagcattattgatataagggaacaattccctttaattgacttagacttagcgatgaacattgctaccgaaatggcgattgagtatcccaaagatgttaataataatactccctatgttttaactacagactttatgttatctgtgaagcaaggaaagcagatagttgaaaaagctcgcactttcaaattagttaaggatttaggaattaaatctgttgctgaaaaatttgagttagaaaagcgttattacacagcaaaagggattgattggggtattattacggaaaaagaaattcctacgcttttagtaaaaaatgttgagtggattcattctagttataagttagaagcagccgcagaaatcaatgttgatgagttgaataacatcgcaaatattttaaagtcaaaattgcaagaaagcgattctactattaataaaattacaaattgcttagataaagagatgaatctagaaataggtacgtcactctacatttttaagcatctccttgccaataagaaaataatcatggatatgcaaacaaatgcaatatctagttctatttcagcgcgagaaattcaaaaaatcattttctagaaatttatattggttgttcccatgaataataatttgtttgttaatgacttaattgagtggattgacgaatcaggaaacaactttgtagagagaattatttggattgatgaagcctatatcattgcctttacgatagatataaatatcaaaactggatttccagtgtctaaaagagtatcagatatccaagaagcaatttatgaaggtcgtgcattgaagttgaggacagacccttgggcaagaatcgttagagatgaagacttatctgctaaagaaaaagaaattagagataagtattgggatattatttcatctatagtaattcaagaaccatctatatactatcgagataaacgaggctcgctcattaaacaagttatagaaaaatataataataataagagcgaaggaaaattaattgaaagaagcgtttatcagattattaggagatactggcaaagaggtaaagataaaaactctctcttacctgattatgcaaattccggtggcaaaggcaaagtaagagcatctagagaaaaaaagagaggaagaccaagaaaatatgctcatgagccagacatcggtgtaggtataaatataaccgatgaagataagaaaatatttagattagcagttactaagttttatcacaatcaaaaagaaaactttttgacaactgcttatgatttaatgattaaaaactattattcagaggaaactatttacgatgagaatggcgttaaaaaacatatattaattcccccagataaacgaccaacattaacccagtttaaatattggtatgacgttgaacaaggagacattagaaaaaaaataatttctcgtaggggagctaaaaaatatgctctggaacatagagcaattacaggaaactcaacaatggaaactattgggcctggttctagataccaaatagatgcgacgatcgcagacgtgtacctagtttctgcgtacaatcgcaactggattgttggtagacctgttatctatgtagtcatcgatgtttttagccggatgataacaggagtttatgttgggtttgaaggcccttcttggataggagcaatgatggctttagcaaatgcagccagtgataaagtagcattttgcaaagaatacggtatcgagattacagaagatgaatgggcttgtcatcatattcctgatgcaattttaggcgatcgcggcgagttagcagggatggcagtagaaacactaattcccaatcttggtattcgtatcgaaaatgctgcaccctaccgagcagattggaagggtttagtagaaagacattttggcattatccacggtcatatcaaaccatttgtgccaggttacatagacaaggattttagggaaagaggagcaagagattatcgacttgatagcaagcttgatatagagcagtttactgaaattattatcaagatcatcctttaccacaacaatgaacattacttagataactatgaaagagatgaggcaatgatagctgatgatgttccccccatacctagagaattatggcagtggggaattgcaaatcgttcaggtagacttaggactattcctgaagatattgttaagctgaacttaatgccaacagaaaacgcaacgattaccgaacgtggcattaaatttaaaggaatgtactacacctgtcaaaaagcaaaaaacgaattttggtttgagaaagctagaagtaattctctttctaggttagagaaaaaattagaaatttcatatgacattagaaaacctgattatatatatcttcgctctcctgatggtagaaactttgagaaatgttttcttttagaatcagaatcaaaatattttaataaaaatttacatgaaattgaatatttatttgcttttgaagagttacaaaaacaaaaaaataaaggtttaaaacaacaacagaaagtagacttaatcgcagaaattgaaagtgtcgtgaataaagcaaaaaaaatgaccgaggaaatgaaagatgataaactgagcaatagaaaaagaaccgcaggtattcgagataatagaagtgctgaaaaatctaaacgtcgaaaaattgaaggctttgagctagaaaagagtgatcatgaaaatactagtaatactgtggatattgaaagtcaaaaagtagagcagccacaatcattgcaacctaactatcttgatattcttcgtcagaagcgagaggaacgaaagcgtgaacaagataaatgattggaaatgggttgaaattccaaatggtaaatctgctgctgtagctaaatataatgaccataaattaccagagtacaataataaccctttaattcaagcattacctccaattctttctggagaagaatttattgaaaaagcaataatactccccagttacgcacctgaagagagggaaatggatgcacaccgtcgatttcactgcgttgaacgattatctagatactttcaacctttaaataaaacggttaatttacagcaggttatgtgtgcattattaatgcagggctacatagcacgtaatatttccaaacctgaatatgcacgccgatcccgacaaatttatgaagcgataaaagcgggagatggtagaaatttagatgtttatgtaaatgttcccacatccacatccgcatctggtttaacattaattggcccatcaggcatgggtaaatctactaattttattaatattcttaatttatatcctcaagtaattctacatccagaatacagtacttaccaaattgtttggttaaaagtcgattgtcctcatgctggttctctcaaaggcttatgtacagatatatttcttggtatagataggttactgggaaccaactattttaaaaaatttggtgcatcacgaaattctgaagattatatgctggctcaagttgcccaaatggctcatactcaccatttgggagtcttagtgattgatgagatgcaaaatttagtaacagcaagaagaagttgctctgatatgctgaatttcttagtaaaaatggataacatcattggagttcctgttatccgtattggtaccaatgaagcttttccaattcttcaaggtaattttaggaatgctagaaggggaactggtgaaggaagcgttatttgggacaggatgagaaatgatgatgaatggtacttttttatggagaccatgtgggagtatcaatggacaaaaatatctactgatttttctgatgagtttaatgatgttttttatgatgaaagtcaaggaattattgatattgccattaaactttataaaatggttcaatggagagctatttcactgggtggaaaagaggcaataaacgccaatttaattaaacaatctgttaaagacggattatttttagtaaaaccaatgctaaatgctatccgttctggagacaaggaatggatgattaagtataaagatatagctcctattgatactacagaatattacaataattgtttatctaatttagaaactaaagatttaaaagaaattagtagattagcgaaaaaacagcaagctgagaatggacatttatcagcgacacaacgtcatataattcttaaacttttagaattagatgtagaaccgcaattagccaaagaatgtgcagtacaagtaattaattctggcgaagaagatgctgatattcctattttggtaaaacaagcttatgctctagctttgggtgggcaagttcaggaggctactgtaaagaaagtgagaacgcacacactaaaagcaaagccaaaatatcaaataaacgatattcgacaaattgcggaaaaagcaaagaaaaatcaaactagtgcatatgaaggtttgaaatcgacaggaattatcaaagatccagtccaggattttatcactatcacctaattatatgcttagtttctttccaacactatatcctgatgaactgttatatagtgctttggctagatatcatatacggagtggcaataaaacctttaagcaaactgatttagaattatttggttacagttctcagcaactatgtaaagttactttaaccaataatttgaattatttagttaaaaacttgtctttattttctcagttaacagttagtgatttactacaaaatcataccctataccctttttatgcaagtttcttaataccccagcaagcttggcaattacaagactctatgaggaaaaagctaggtggctctattttagaggttgcaaaagtagctaatcactctgctgacaactcaacaaagtttttaaagttttgtcctatatgtctagaacaagatacacaggaatatggtgaaccatactggcatcgaattcaccaaatacctggtatattagtttgtgcaacccatagagttgttttgcatgatagctctgtagctgttgattctaagggtatccattattatgcagcgagtccagagaattgtctcaccaatcaaaatcaagtgaaatgcgctgataacactgtagaaaagttattaatcttagctcatgatatttggaatataagtactattaatattccttttaaaggtttaacttggctccgcaatcaatatcagtcctatttaattaatcaaaagtttatgaccctcctacctggggagaaatttagatttaacgaaaaatctttttcaaattctatctgtgatttttatggacaagagtttctagaaataattaatccaaatttaatcaggaatccagacaaatatttttctggttatttactagcttgtgatttgaatccagtaatcgaccggattacacatatattgataataaaatttttagctaattctgtagaaatattttttacataacatacttgttagagtacttaatatataaaaatattttttagcaaaaaatatattaatttacttgaaattgcataccgattaaagatgtagcaatagagtatggtagagaaacaacataaattaagctcagaagtagcgatttttcagagaaatgaaataaatgggtgataattttcacgtatcaactcagagccatgctacagaggttttaaatcctcagttaatctacgtggacttaagctttcgtgtaattggtcagactttacccatagaccacggctatgctttgtatgctgcactgactcacttacaggacaaacttcattctctagatgacctcagcattcaaactattcctggcattcctgatggcaacgattcacttcatcttaataaccactctaggcttcggattcggctaccagtagataaaatacctttagtttatccgtttgcaggtaaatcactaacaattggcaggcataagattcatttagaaattccccaaatgtatcttcttcaagcggtggagaaattgcgatcgcgtattgtggttatcaaaggctacgaagaaccaaagggttttttagcagcagcgcagcgtcaactggaaaaactgggtgtccagggaatagccagtatacctaccaaagctgatggcaaaccagaacgcagaagtatcaaaattaagaaatttacagttgtgggttttggattggaggtaacgaatttaaatgatgaagattcaataaccttgcaaaaatacggtgttggcgggaagcaaaaaatgggttgtggagtttttgtaccagttaacgaaaaacgatagcagttgtttaaaggcagatgataaatacaacagctaactccaaaattcagttaaatctgagcgactctagcactactttgttacatcgcgcagggatagcaggattttggatgacgctaaaacagttggaagaaatatatccgaatcctgctcaacgtactggtaatttaacctgggtactaacaccccatagcatcagtcttaactgggaagggcaggatttcgcagctttagactggttgctaaagcaatcttttcaaattagtgatgagggtttaattttcctgacaggattaaatccaaaagcaattcatattgaaagacaaataataatccatcaaggtattacaggaacttttttacagcacaataaatttttcaaattttcagacaaaaaattaaagtccataattgttgacggcagacaatttgtgactgagtacaaaagtgctatgtcttatgctcatcagcactttgctaaaaagttgtgtgatgaatctggccaattgttacaagagcctattggcatagtaggttggctgtatccaggagcagtagttcgtcattctgcttttccaaaacaaaccaaatttgaagagaagccagagtatgcactagcgttattgtttgtgcctgtagcgtgccactattttattttgcgatcgcacaccaaaccccaatctacaaactatattctggttgtccccgaagtaaataatttagagttttacgcccagcattgctggaatctgagtaatttgagttacagagattttcatgtatctagcttaagagacgctggattaaaattcctgactaatgaagcagcaatacagataaaacaaaattgtgttaagcgatgtcaggttttttcttttgggacgctaatttggtcagaacagcaaaaagttcgtacagaaacagcaacattagagctaacggaaaaagtgagcttctactataagtttagtcggagttgtttctccaattaccgaatcgttgactatgaaaatcaacattttatccttacaagtctagttcaaggaataattgctaataatttaggtttagggttgccttggtggaatgattttggcaacatacttacatctagtaatttgtttaatcaaatagctgatgaaaatcaaggaatttatatgatgattcaagagtctgaatgggacatagaatcgcaaaagctgtttatcaaagcttgtcatgaagcattaaaggtaatatacgccaaaatttattcccgaaccaaggaaaatgaatatgctcaaattgaacgagaaaatacgaaaattatatctcaactaggacgctgtactaatgctgaaaattttagaaaatttattgcggaattctggggcaaagcagggcaactttcaattttagaagaacactgggaagaattactaccaataacaacaggtgttaggcattggaaaatgtccagggatttaacttttattgcaatcgctagctatcccaaaagtaagaacatcaagcctgaatcatcagaaatatctcagacaagtagtgaataattagaattttttctattttcttaaatccatgattttaaatttttaggtaaatactcaatgtctcatctgtttggtaatattttaactatttatggtactgctgctaataatcgaggtgaaaatgaaggtaatattactaccctacaaaaaataaactggaagggcgaagttcacaccagtgtctcagcagaggctattcgttgggcagtgcgctactactggcaaaataatggttatgaagtaaatcgacgttgggatgaaaatgcacaaccactggctgatcatatctggcaagacacgaacttcaatagtgttcggttcattgatgatgatgttttaggattcatgcaggcagaggcagcaagagttgaagcaggtgagcaatctggaggtgaagtccaggaagcatccgcaggagaaattcaaaatgtgtctcaagatgaagagacagcaagcccaaaaggcaagggaaaaaaaacttcgcaacgcaaaggacgagaaagatcacaagggagagttaccgctaaaagaggtgtactagaggttactcgtgcagtatcattgattccctatgggggtaacattacttttaatgcagtcagtggaacaaaaggacgaacttctctttatggtacagaagttcatgctactcgttatcagtatggttttgcaatgacacccaatagtctccaagacaaatctcggatcaatgcagttctagatggcttaatttcaattggagaagtaggaggaaatcatgcccggtttttatatgatttttccccagatagtattatattacgctggacacatgatttctctcctcggtttctctattgctttgaacaagatgaatggggaactatatcagttccagatttagtcagacgggtagaagctgaagatattgacccaaaagaattatggattggaggagcaattgctagagatttaggaaatttgggtgcaaatgtgtttccaggtgtgaagaaagtagtagaagaattattaaaggtcattacacgagacttacaattgccaccaaggagttcataatgtgacgactattgctttgaaagtagaagtccctatcgcttgttttcgccagtctcgtgctagggagtatgtagaaacctattcggtaccaccaccatcaacagtatatggaatgttactgtctcttgtaggggaagaaaacagatatactcactgtggagtcaagctggcgatcacacttgtatctgaaccagcaaaatcaactgtaattcgtacctttcatcgattgaaaacgaagaatattcatgatcctaaaaataataaacctgattaccaggagttactgactaatattgagtttgtagtttgggtagaccctggggtagataaagctagaccaaatttagtgcaacgtttagaagaggcatttactaacccagcttctattaatagatttggtggactatgtttaggtgaaagtcgggatttagtaaatgatattaccctcttaccaaaaaactactatgcagaatcaatgcggtggttaatcaaggatgaacacgggttgctaactttaccttattgggtagaccacgtaggttcgcaaggaacgcgatggctgcgttacgagcttcaggaatgccaagtattgcaaccgcctgaattatcttggacttcagttcaaagtgattagggggttattattttattttgcaagtacctttgcttgagaagtctaaataccatgagcaatagccttgtcttcttatttgacaagccttttagggattttatacgcatccaagatgcttgcgatttcctggaacaccgtcaacacaagagttgagggctttaacaactttccttgtgctatgaatagctattaatttttgcaactggactaatcttcagtgatagatgcttgtaaaattgaactagagcttaggcgagtcaacaagtttggcgatcgccgtgcttcaacattagatgccattaggcgttgagcaggcatcgtgcggggtgagaattgggtttacgaaaatgtgcttcaacattagatgccattaggcgttgagcaggtagttagtaataattaattctttgcccttttttacttgtgcttcaacattagatgccattaggcgttgagcagagtctagatattgcaacattaacattctgagggttctgtgcttcaacattagatgccattaggcgttgagcaggaagattttaattatcgccatgtcggggaaatagaagtgcttcaacattatcagatgctgttaggtgttgagcaaaaaaataggctcaagtatttgcgcttaatataaatacgttctcactgagtacaaaactagtcatcttgagtctcgtctttccgagaaattttagcgataattttttcccattcctcaatttgcttctgtatttgtaatttgcgatcgctcaactctttattatcattaacagacaaatcctgaccactcaatcgctcacggtaaagagcaatcagttcggttagggcttttttattgcgtgcttatcctcctgagtcagagaactcacattgactggaatcagctttctgcctattctctccacaaattcagaccgacttaaatccatgctgtcggcgatcgcatctaatccatcaatcccggtaggagttagggctaggttaactcgtttcttcacctcatcgtacagttctggtacgtctttttgacctttttgccctttcttacccattgccgtctactttttacattcctcccaatcatagtaaacacattcaacactttaagctaaacattaaaactgtttctaatctttaggtattgtgtaatgcctaatttagctagataatttaggtattgtgtaatgcctgaataggcatcttgtaggaatatgagtaactaatttcaccgtttggcttatcaacatctaaacggcttaattttcatgggcaatccttaattgctgcttatctaattcaaattaataaaaatctgctaaataattcggtcatttttcacaactatatggtgagttttttccctaaaccttatccagaggaaattttatatagtgtcattgctcgttatcacattagaagtggcaataccagtccaaaaattacacttcaagagttatttaattcacaaactactgtagcaacagtagatttaccatcgaacctgaataatttaattcaaaatctacaatttatttcaaattaccaagttgaggatttgatatataaacatactctctaccctttatatagccctttcttgtctgcaaacaggtctagtcaggttttggaatctatgaaaggagattacggaggagatattcatacaagagccggaattatggcaagctcaattactatgccaaagtattttcggttttgtccaacttgcctagaagaagacctaaaaacttatggcgaaccttactggcatcgcatccatcaaataccaggggttttagtttgtccatttcatgctgaagttttgcaaaatagtctagttcccttacacggttttaataagcatgaatatcatgcagctagtacagacaactgttctattactaaagaatcaactttttttagcactgacatactgaaaaaactactgttattagccaaagacttttggtggttactcaatagtgaaataccttgccaagaaccacagtggtttcgcaaacaatataccaatctgatgattgagcagcgtcttgcaactgcaacaggtcgaatttatcagaaaagactactggataattttttgtttttttatggtcgagaaatgctcagtgccgttgattcaatggtaaatcataatgactcaaacaattgggttactagcattgtcaggaagcataggaaatctttccatcctcttaggcatttactgataatcagttttttgaaaacgtcagtagaggaatttttcaagcaagatactgaatacaagccttttggcgaatctccttggttgtgtctcaatgctgccgcagaacattatctacaaccagtgattaccagtttagacattactttatgctgcgatacaaaaaagcctgtcggtactttttcttgttcttgtggaatgatttattgccggactgggcctgatgaaacagatgaagacaaacttcgcattggtaaaattaaaacatttggtcaactatgggagcaaaagctgaaagagttagtagaagttgaaaagttgggtttgcgggagacagccagaagattaaatgttgatgctagaactatcaaacgttatgtatctcgtctgagactgacaacttattggcagactagaaaggaaaatgactctgtaggcttacaggaattaccagaaatagatcccaattttgcaactgaactcaaattgaaacacaggcaaaattggatggttttacaagtacagaaccctgaagcttcaaagacaactctgagaaaactagcaccagccacctatatttggctatacaggaatgacagagaatggctcaatcaaaactcacccgctttacaagttgctgttccttccgttgtgagagttgattggcatgagcgagatcagcaaattctcactcaggttcaagatgcagtgcgatcgctacttaacgctgagataccagagaaaatttctattagtagggtagggaaaactatcggcttacttgcattactcgaaaaacatctcgaccaaatgcctctaacaaaggcttacttagaatcagtagttgaaacggtagaagaatttcaaatgcgccggatcaagtgggcaatcaagttgcttgatgaatgtggagaagaaattatgcgctggaaggtagtcagagttgctgctttgcgagaggattgctctgaaagggtcagtgcatttctggaaagtgaacttgagaaagcatacaagaaagagaggtgattcaattcacctctccaagtgatgggataaatgctttgtgtgttaggccgcgtcggctaccagtaagccattcatagcgatgatgatgatttgtgctgctaaaggagtatcacaacgtggtctatcgtcgctattacagggttgtgctacccatttaccctccagattttggtagaaagtgccgagaagttgataaccattccaaacacggtaaagctccccaaatacttcagataccgaatcaatctcaatttctggtgctactgggtcagcaagctggtcaatatattcctcaaactctaattgagctaaggcttggttatcaaattcatcttgtacaatcatcatgagtaacctcattaatggggttgaacaaaaagcgatcgcatttctcttggcggagggcgatcgcctttttgatatcatcccacaatatggctactttagtagctaaataataacaaatgtatctaaagctttaatttgtcacttcgactgtgcttaaaaaattgcttaccgatatttccaatgcagtacatatagcttctaatacttttagggaaacactttcagactcaccatattctaattttttcaagttttgatgggaacattcaccacctctagcagcaatttcatcagctagtttctgacgtgattttttaccacgcaatcgctttaaaatgattcctctgtcttgattccagacgacagatacaacatctgcaacataaatatacgtttttgtttctttttcacccttattgcccatatagtagctacaacagtaaacaatacataaattttgagctactatagtttacaaattattaggatttaggtatctcaaaacgaagttgcgcccggtcttcaggatgagagcgttatcatccaagaagatacacaatgcaggttttgctaagagaatgtgtcatagccaatattatgagtaatcgcggattccttaaagaggtagcaaacaaatatatattaggctgattatgttaatttgctaaaaatgttcagttcttaaaaataactgaacgtttttatctaagtataagtacgagcttattttattagtagattattaaattaataaattaataaattaaataattacttgggctatgacaccgtataaacacggttttaaaatcaaaataaggatttaaagaagaaatatctataaaagtatttgcggcaaaatgtggcggttaagagtatatgcaaatacaataacttgaatatgttttcctactattatttgtcataagtgtatcctttatggcgcaaaccatagtaatacccacgggcattcctatcataacccttcgcctccaggtacttgtattggctttgggggaagtttcaacatggtggcgaactcaatatttttctgctgctggactgagatttttagaaagaatctacccacgtacagcttttgccgcagctatcaatgctgctagtacggcagctcgtcctgttcacgacgctagtactggcagtaaccaaatctaccatctgtttcgccttcctatttccatagagcgggaagttcaactattactaacaaaggcacaaggagcaagtttggcgttagaagtcaaaccagcacttggggataaagacaagttgatgacaatgttagatgcactaactacagaaaaatctaaggtagcggttggtgcattacgtttaggaagcagtgcagaggcataccaactagcaacctacaaacggatggcaggagcatatctaagaggttttcaaacaggcgatcgcgtctttccctacatggaggcagaccaggagtgattgttatgacatcgggtgacgcagtgcaaaagtcacctcgttacagtattgcgattgtctgtaagggaactgcaatggtgaacgagactcgccatttaattcaacagtggcatcctacagaaaatgtggatacatttgttaaacgcgttcaagctgaggatctgctgggacgacaaacagcccagcgagcaaaggacattgcccgaaaagtctttgcagcacgctttttgctaccaaacaacaaacctgctcgactccttaaacaaattgttgaggctggtcttccccataaaacttttgtagaaatactatttttatttgcgtgtcgtgctgataatttattgtatgattttacgctaaatatttactgggcagcagtagcacaaagacgaaagaaaattttcactcaagacgttttagacttcttcgagtcagctgctgttgatggacgaattctctctccttggtctgagggaacgcaggtgcggacagctaggggattgttagcgacgttgcgtgatgttggttttttacgcgatgttagtcatggtaaatcggagcgagagattattccctactacatatctgatgaaggtgtagcttgccttgcacgctatctccatgaatcaggaatttctaactcagctttgtgtgaacaccaagactggaatatttttggtctcaaccgtgaacaagtgtgcgatcgcctagatcaacttggagaacaccgtggattaatcatacaaaaagctgggtcagtagtcagcatcacttggaaggtcaactctatggaggaacttattaatgtcctctctcgatgaaacttttgaattacttttacaaaagctagaccgcccagacaccctcaatgctgctaaaagtgacccaattttttacttcgtttacaaacccgaagatatgctcaccctaaagcagcgtttatcgctttggaaagctaaattaagggagttgaaatttgatgttgaaagaatatcgctctccgaccttttgtggcagattattgacgaatcagggcggtgggaagactggctagaaattgaaccttcagcagaggttgaggagttaaatcaagccattcgtgatgttttaactagtcagagtcgtctaattgaagaggtggcacaacgaattaattctttgatgcctcccaaaattgtttttttaactgaagtcgagatgctgcatccttatctacgctctcggactctagaaaacaagcttcatgatcgcgtgccagtaccattgataattttttatccaggttatcgggcgggacagtacggtctacgctttttaggtttccacgcagaagacagtaactatcgctcgataatcgtcggaggcatttgatggcaacaattcaatctcttttttccagcagtagacctattgaccgacagattgaaaaggtcatcgattattctgcacaggatgaagacagactagctacagaaatttcagaatatgagattaccgataatattgagcgatgttatcggaggtttctggatgtattttcggaaggagttcgtggtggacgcgtaactgagactggaatatgggtgtctgggttctatggttctggcaagagttcttttacaaaatatttgggatttgcattagaaggagagagaaaaaaagtacgtggcaagccatttctggaacttttatctgagcgctttgttaatcgcaatactatccaagccgaactactaactctagttagacaacattccactgttgtcattttccttgatttaggttctgaacaactttctgaaagtgctgccacgactgtttccacagtcctttattggaaagtattgcagtgggcaggtttttctaaagaaaagaaactagcacaactggagttaactttagaacgtcaaggaaaatatgctgaatttcagcagctatatcgagatacgtataacaaagaatgggaagaaattcacaatgatcccttactaggggttagtcgcgctgcggaaattgtcactcaagtattacctaaagaatttcctacaagtaaaaactttcgagaattgagatttgatctggctgataatttgcgcgatcgcaccagtgaaattattgatttagtgcgacagcgaaccaaatgtgaaaatatcttatttttactcgatgaagcgggtcaatacgttgctcctcgtggggaattgattcttaacttagatggaatggctcgtaatttcaaagagttaggtgaaggaaaagtctggataattgccacaggtcagcaaaccctgaatgaaattgtcgaaaaagctgcctataactctgctgaactgaacaagctgaaagacagattcccaatctctattcaccttgatgctagcgacattagagaaattacttatcggcgattattgacaaagccgcctgataaagaacaattattaaaagatttatttgctacccacggtcaagcggttttaacacacacacgactaactgaaacagtactttataagaatgatccgaacgctaccacctttgctcaactttatcccttcctgccccagcactttgatttgctgctggagttgattcgcaccctggctcggtcaacagggggtgttggcttacgttcagccattcgtgtgattcaagatgttctcattgacaaaagccgtgttttgccagcaaacactcttaaattagcagaacgtcctataggtgttttggcttgtgtggatgacttctacaacactttgcgcgaagacatcaacaaagtatatcctcacgttgtgagtggggcagataaagttgtcagaatttttcctaatgatgagatcgcccatagggtagctaaagctgtagctgctttacagccgattgatacctttccgcgcacagcagaaaatattgctgctcttctttacccagaattgggttcgctttctttattcgatgaggttcaacaagcactcaagagaattttaaatgagaaggagtgcggtttaattgaagaccctcaagcaggtggttatgtttttctcagtgaatctgttagacctttgcgagataagcgaacttcctacatccctacgtctaacgaatgctctcgcattaaagaagatattgttaagcaaatttttcgggatcaaccatccacaagacttgacaatattaaggaagtaaaagccattgtcaaactagagcataagctagtcgttggtcgggatgaaaccatcgatttcaaattagaattcgttgatgctggcggattctccaatcgccgtactgaattgatggcagaaacaaacagtcggcgagaattgaaaaactctattgtttggttggcaaaatcagacaacacagtagatgaactactgcaagaaattgctcgttctgagtgggtagttagagaaattgatgagcgagcagatgataaaggagatgtggcacagtttttgcgagcagagcggcgttcaggcgatcgcaaccgagacgaagtagcgaaaaaaattgagcgcttgctgatggaaggaactttgattttccgaggaaaacctacaccagttagtgaggcaggacagactctaaacgctggagcgcagacggttctcgcaaatgcagcaaaagaagtgtttcatctacacaatctcgcagctattcgaccagcaacggatgttgctgctaagtttttgggcgtagagcgtttagatcgcattacagagcaacttgatcctttgcgtttagtgactaaaaaagctagcaatactcgtgttaatgtcaaccattcagctttggcggaagtgctgcgagtgttccgggcaaaagtagatgagtctggttcaggtcgcttgcaaggaaatttcctacaagattttttctcggcagatccttatggctggactaaggatacagtccgttacttatttgctgcactattgacagctggtgaaattgaattacattaccccaaagctgatggcccactgcggacaccggggcctttagccgtggaggcaatgaaaaatactatggaatttagccgggtgggagtttcattgcgggatagcaaaccttccattgaagctttggagcgggctgcacagcgtttagaagagctttttgctgtggaagttgtaccgttggaagacaatatcagccgtgcagtacaaaaacagatgccagagttattagaacaaattgcagacttacctgttcgtctacgtcttttggatctgcggggagaacaaaaggcaaaagaactgcaagcaagtttaacggatatcctcagaggcgatgctagcaatgcaacagcacttttaggtagtcaaaattgcacaattcctgacgatatccaatgggcaaagcaaattgttaatttactcaacaatggcgctgaaagagaattcaaagtagcacgatcgttactcaataacttagatgaacttaaggatttattttccaagcaggtgctagaactgtcatctcaaggtaatcgagaagctatttacaatgtttttcactcagaacggtttcaagaacatctaccagagttgcggcgagcagttcgagaattgacggggcaattagaagaacgctacacaactgaggttgcagagtataaacaagacttacaaaaagccttaaacggcttggagctagagccagaatggttaaaactaactgacgagcagcgaaataatattgccgatcgcttgcagatggatgttgccgaacaaattgacggacagaatccagtgcgatcgctccaggtgattctcacccgccgtttaggtctaactggagtagttgataatttacggcggcagatacaacaatcagtgccacatgaggcggaatcaacaaatgggctagcaggtacttactctgtagaaaatctacatgaaacagaaagagtgaatacacctactggtgaatacactgtagaaacagcaattgatgcagccgaatttgtcatgccagtacttatagaaaattctgagcaactggatacttggttagcttccataagaggaaaactactagaaattttgaatttacgtaagcgtatacgcattaagggataaatatgagctttgatcgagaaaccctcaacgccttagctagaatggttgcagcgtgtaggcggcgactgacggaagatgtagaaaatcaactccagcagactttcgggttgtatgtagatggcacaattcttcccttatcccaattgacccatctgacagaggagcaaaaggttgcagcgcaagcattacgtgaactgctaaaccacttcaaagccagcgacccacaaaaaagctatcaatctgcttacaatcgcacaattctggaaatctcctttaccatcctcaaccgtttggcagctttgcgcttgtgtgaggagcggaatttagtaattgaatgcgtccgcaaaggaatggagtctgacgggtttcgcttgtttgaaagacttgccaatggcagtttggggagtcgttacgaaacctatcgggtgtttgtggagtccatgtttgacgagttggcggtggatttgggagtactatttgaccgcactactccacagtcaacgatttttccgagcgatcgcgtcttaacagaagtcttcgatttgctcaatgatgtcacactgcaacttgtctggactgaagatgaaacaataggctggatttaccaatacttcaatccacctgaagaacggcgagcaatgcgggaagcgtcccaagcaccccgcaatagtcgggaattagctgttcgcaaccagttttttactccacgttatgttgttgagtttcttacagaaaatacccttggtcgcctctggtatgagatgcgtcaaggagaaactcgaatcaaagatgaatgccagtattttgtcgaaaattctgagcaattcttagccagggatcgtaaagacccccgtgatatcaaagggctagatccggcaagcggtagcggtcattttctcctttacgcttatgacttatttgaggtgatttatcaggaagcatgggaagatgaaaattccccgccctcagaatttacgggtcgaaagttgcgagaagattacccaactttagaagagttgcacagacagttacctgtattaattcttaagtacaatttgcatggtattgacattgatgcccgtgcttgtcaaattgccgctcttgctttgtggctacgcgctcaacgttattaccaatcgctaaatattaaactaagtgaacgtccacccatacaaaaaattaatattatctgcgctgaacccatgcctggggaagaagaattactcgcagaatttatcgatgagttgaatcagaaacgtccaccaattattggtgaattggtaagaaaagtttttgaaaagatgaatttagccggagaaactggagcattacttaaaattgaagaagaaattagagatgagattacacaagctaaaacacaatggctagctgaatataacccagagcaaccaactctattttcattaggagaatattcagatgttaaccaattaagtttatttaagttcgccggaattaccgatgagcagttctggactcaagttgaagactgggttatagaagagcttcagaactatgctaatcgagcaacgacagggcaagttttccagcgtcagctattttctgacgatgcgctacagggatttgcctttgtggatatctgccgtaagcagttcgattttatattaatgaatcccccatttggtgaggtaagtattccttcaaaagaatatattgaagaagtttatgaagataccaagggtaatgtttatcaaacctttgttgaatgtttccaagacaggctagtagcaggaggattcttaggggttatttctagcagaacaggctttttcttggcgcaatcaagcgattggcgtaaaagaatattactgcgtttgtatcgtccgttattgttagccgatttaggttatggtgttttggaagcgatggtggaaacagcagcctatgttctacgtagtattacaatagaagaagataaaaacttaacattaaatcttgttccacaactattagaaattcctgtagatagacagagatgttttagcattcccaaatatcagaaacatcgaggcggcttaaagcggcatcaggctaatcaagaattaaaaaaactgcacgaaaatggttatatatcattgacactaggtcgttttattcgctataaagctaattttgcaaaaattcaacagtctgatattcctagttatttagcatatcctaatttaatttgttttcgactgttggaggaaggagataaaaaaagtgccttaatagatattttacaaaattacaatgactctagatattttgtagtttcgccagaaagtttttcaatggttcctaatacaccattttgttattgggtaagtaataatattcgccagttatttactaaactgccgcaatttgaaagtaatggtagaatcgctcaacacggagcatcaacaaaaaaagatccacgatttctacgtctttggtgggaaatactacctaataaaatagtaactggtacggtagaaacaacaccagaacagttttgtcaacaaacttttgaggataagccttgggtcttatttgctaaaggtggagcttattctccatattatgcagacttacatttgctaataaattggaagaataatggcgaggaaattgaacaatatgttttatacaaatatccatatctaggcagaagtggtgcagattggattctacatagggagtgtaattatttccaagcaggcttaacatggactactcggactactagcaagattagttttcggaatttgcctgcgggtagcatatttagtagtaaaggagcagcagcttttactaaccatgaaatgtattggttggctattttacaatcgtctatctctgaagctttaattagtttgcagcttgcagcagtagatgcagcagcccgctcttatgaagtaggtttaattcaacgtacacctgttcctcctaatagttctgatttccataaggaaatattagtaaaattagcagatttttgtattggtattaaacgctctttagatacagtaaatgaacatagccacatatttcatatacctgctctgcttcaagcattaggtaataacttaactgataagatttttaattgggaagataatattaataaatccactaaacgattaagtaagtatcaagaacaaattgatgatgtcgtcttccaactttacggaatatcaaaaacagagaagaaaagtcttgaaataaatattaaaaacaaaaatataagaattgaagataatactgaagatatagacgaagaagatgaaactgcactagcagcagacgcaaaacagctagttactgatttactttcttatacactcggttgctcttttggtcgttgggatatccgcttttctacaggcgataaatcagcaccagaacttcccgacccctttgcaccattaccagcctgttcaccgggaatgcttattggtactgatggtttaccagtttcagaaactccgccaggatatcccattcccattgcttgggatggcattttagtagatgaccccaatcaccccaacgacatcacccgtcgtgtccgtgaagttttagaaattatatggaagaacaacgccaataaaattgaacaggaagcttgcgaaattcttagtgtgtgtgaactgcgggattacttccaacgtcctacaaacttctttcaaaaacatctcaaatgctataccaaaagtaaacgcaaagcaccaatttactggtcactttctacaacatctagttcttacacagtctggatttattaccaccgccttacagaccaaacgctctacacaatcgtcaaccgctaccttgaaccaaaaattgccgaggttgagcgtatcactggtggcttagaaaaagaattagagacaaaatcgggacgggaagcttcacaagtacgcgataacttacacgcaacacgcaaattcctcagtgaattgcaagatatgaagcaggaacttttgcgcgtcgcacagctaccttacaaacccaatctcaatgatggcgcaattatcactgccgcccctctacaccgtttatttgctttgcgacagtgggcgcaagaaaccaagaaatgttgggaaagtttggaaaaaggcgaatacgattgggcgcatttagcctacacaatttggacagacagagtgcgggaagtctgcaaaagggataaatcaattgcgatcgcccacggacttgaagaagtttaccaagcagctaacccagaaaattcccaacccaaaacaaccaaaggcagaagccgtaaaaagacgacacaggagtcagtataatgagcgtctcagactttgtttgccgacaattacaccaaagattagaacagcaccgtattgtcgtttggtacgatggcaatcgcgcttttgctgattttattcaatccttccaagctgactcctgtgtagtcgtatctgctgttgagtctattttgaactcccgtcgtcaagccgaagccgtctaccgccagatgaacgagtctaataactcagccaaagctgggttgaatctcctcatttacgtaccccgccagcgcggaacaatagaagatgagaagcggcaagatccgtttgaagttttcgcatgggctggtgtggcgtttggcgacaaagaagcagaacagttagaatctcttgctagacaagcaatgccagaacgggctatagaaattactcggctatttgcccaaggcagtccaacgctatcgatgttggataaattacagttccatcaccgttcgcctttactgttagaggcgctaggtactgactcaccatcagaagcgatagccttagtcctctgcttagaggagaaatcacaacgaattgattctgttaaaggttgtttaaaagaatttttgccgttattggcaacggagattggttttaaacctgcatccaaagctaaatcatggacagaaattagaaagcaactcattcagtatgtgctgtttagcgaatttgccctcgacctgccttgtgacctgccagagtcattaagtaccttacccagagccaaagccagccatgaattagtgatttttgcagtgtgcgatcgcatgagggatagttccgacttgcgatcgggctatgttcagctagcagtagaagtagaaaaccagttgcaccttggcaatctcacagaaaatatagctcaactaggtactagagataccttcccctttgcagaaaagcgatacctacagcaagtgctggagtatgtgcaacagaataacttagcagatgcccagaagattttaacccaacgccgtcattccatctggaacaaccacttggaacgaggtaatatttggatgatagtagagcgttgtgtgacatttctcgccacaagtaatgctgtagaagagttgtcaaaaaaatctttacagtcaatgtctttacgccaaatcatctctgcatacgcacctccagatcgctggggatgggcagaactagaccgacatcagcgactatttgaacagggtgcaaccgcctatgcaggagatgagggagagatagaatctttagtcgaattttgccgccgacgttacttagaagtggcattagcaattcaagactgcttccttaaatgtgttcagaaagaaggttggtttcccgaaggagtgctgcgataaacccaaatatttgaccagtatgtagctcctctactggaacagaacaacaaaaaagtcgcattttttctagttgattccctgcgcttcgagatgggacgagatttggcagaagctttagaacagttgggcgaagtcgagattttaccagtcgcatctgttttacctacaactacaccttgcgggatggcagcactgatgcctaatgctgatggtacgctcagactggtggaatcaggcggagagctaattcctgtcttaggtgaaaggaaactggaagagtccaagcaccggatgcgactgctacaggaaaaatacggcgatcgcttcaaagatatcgaaccggaagatattttcagcaaaaaggtaaatgccttgggtaagcagttagcctctgtggatttattagttgtccgcaccaaagaccctgaccgcattgctgaaagtattggcaacatgaaagcccgaaaatatctttcggatatagtcgctgaaatggtaaatacaattcgtcgattatctacaattgggttcacccattttgtcattagtgcagatcatggtcacgtcctaattgacgaaataccattaggagatgtaattcccaaaccagggggtgagtggttgaaaactaagcgcaggagtttgcttgggcaatttatatcgggcgaatcttcaagtgtagttatcttcaaaactgagcaggttggtatccaaggcgatgcccaagacctctgtgttgctaaaggctttaaagttttccaacaagttgaaggttacttccacgaaggcataagcttgcaggaagcgatcgtgccattggtaattttgcgatcgcaaggtaagattactgctcagagtaagccaaatattttcctgcgttataagtacgattactttaccaataaagtcattaatctgcgagtctgctatgaatatttgctaccagaagcaatacaagtccgcattgaagcttacgatggctcaacagcaaaagccaagcgggtaggtaaagcaaccgactgtgatgctagagacgaacgaactggtgaaatcatactccagcccaatcaagaaacttcggttcctatcttactggagtctgacgacatttcatgctccaaaattgaaatacgagtaattgacccacaaactggcgtaatttgggcaaagttagaactggaaaatcgcttactagattaagaatgaactcatgtttcaagatgccttagaccaaaaagttaatcaaacatttccaggaaaggtagtacgtaaggacttgctacatcaaatcaagggtggagaaaatgtaccatcttatgtactggaatatcttctgggaaagtactgcgcctcagatgatgaagatgaaatccgcattggtattcaggctgtcaaagaaacactacaaagcaactacttccgccacgatgaagctaacaaagcccaagcgctagtagaacaacggggacgacatcgatttatagaccgtatagaagttcgttatctcgccagtgaaaacaaatattgggcggcaatggatcactttagttactccagaattcatgttgctgaccgattttatcgacaatacgaacgacttttagaaggtggaatttggggtcttgtagatgttgaatttcaaccaactgaagaagaaggtgctaaagccagtccctttcacattgctgacttaagaccaattcagttagcaagatttaacgttgatgaatatgcagaaggtcgtcgcagcttcagccgcgatcaatggattgatattttgctgcggagtgtgggtttagaacctacccaaatagaacaacgtttaaaactgctgttactgactcggttcattccctttgtcgaaaaaaattataacttcattgagctagggccacgaggaacaggtaaatcctatgcctacagtgagatgtcgccttacagcatcctcatttctggtggtaaagccagcactgcaaaccttttctacaacaatgcccgccgtcaggtaggtttagtaggtcattgggatgttgttgcttttgatgaagtcggtggtttgaaagttaccgatgcggatgcaattcagattatgaaagattacatggctaacggtcgtttcagtcgtggaatcacccaagttttagctgacgcgtctttggtatttgttggtaatcttaaccaacctgttgaaactctagtccaaaatactgcaacagacttatttcagccattaccaaaagaatttgatctggctttacttgaccggatgcacttctacttgccaggatgggaagtgccaaaaaactccaaaaatctgcttacagaacactatggttttgtcactgattatttggctgaagcgtttcgtaccctaagaaaacaaaatcggtttgatgaagtcgagaaagtcttccgttttggttctcatgtagaaggacgagatgcgatcgctgtcaaaaaaaccgttagcggattacttaagattatccatccagacggagaatggacaaaggaaaacctgacagaatatgtagaactagccttagaagggcgcagacgagttaaagaacaactcaaaaagcgaggttctttcgagttttataaaaccagtttttcttacatcgaccaggaaaccgaagcagagatgacagtgggtgtaccagaacaaggtagtgctggaattatctctcaagaacccttacccccaggcacagtgtacaccgccacagcagatggagaagcaagggttggtcttttccgcttggaagtagcttgtacatcggggacaggaaaattgcgaacccctacaggacttgacaaagctttgaaagaatcattaaaccgcgcttacagctatcttcaaagtataaaggaaagaaaaggactcaatgaaactttgggattgaaagatatttacgctgaagctgtggacttgtctggaagtcgtgttgaatgtccttgtggtgtagcattttttgtcgccatcatttcagccatacagaatcgtcaaatccaagctggaactcttatcttgggcgatttaacgattcaagggaatatcaaaggccctgcttcaattgttgaatcattacaaatagcaatggaaagtggagctttacgagctttagtaccactttctaataaaagccagtttgcaggtttaccagaagagatagtcgaaaagctggatattgtgttttacggtgatgttgaccgagcagtaattaagagcgtcgaaatttaagagactatccctattatgtcactctcgaaaaacaataattgaaacaagattctaaacctttgatttaattaagcttcagcctttattttctaacaataactaaatttatagccaaaatcagaaaattaaagccctgaaagctttccagcgattcggttctcctaaaatgacacaacagggctatttataaaataaatctttaggctacaagacgacttagcataatcctactttgagaaacctttaatgtagctgatgagatgttgatctatattgtcgatatcacctttaagctactgaaaatcgagttctgaacggttatgaaatgcgattgctcgtgaccttgtagatgcagttcaccgcaattttgctatcgactggccacagaaataactttttaaaactaacctctgccgattagcgtgtgaggtcgagaattttgttgtgcgatcgcctcactacgaacaaatgctaacttttttacacccctttaaatttgcttgtttctagtatcgctgtttctacgatttttttgagattaatagcacctccaattacagtagaaatactgtgaatttagcttttattgacttggtacttagctaaaatactattcttctattggagtattgaggagcgctcgcgcaataggaaaagcaagacacaatatttatttataaaaaggaaataattcagcttaaaggtttcttaatggaacctgacgggaactttcaatctttcatcaacgtgattatagtaagctcaacagtaaatatacgatttatagttatttagttattgttaaccttcaagccatctaagctaaattacggatgattaacccccagctagacaaaactattgagcgttatgagacggaaattgagagactgaaagtgactgacacggccatagatgccgaacaagttttggaagtgttaagtgccagggatgctgtgcagttagccttaaagggtgcaacattcattcctagcagtaggctaaagcaggttctagagttagatgcagaactcaggaaacaagcagtacacattaacaaagttatcaaagctgaacaattcgcccagtggcgagaaagtacacatcctcctgctgaagcttggtggtggcggttagaaaatcttacccctcaccataagtgggatagatttgattggttgtggaagggtctagtagttgctggctggactgctaacctcagtttattaatcaatattgctactcgctttttgagcgggggagcaggattattgggagcttctgcggttattttgccgagtattctggcattgctacaggcaagtagtgaactaactcaagcaggtaaacaagaatttgacaaattactcacaaaactgaatatcccccagcacttacacgaagaagctaagttcggatcaactttattaatgacaatctttttacttggtttttggttggctctaccgtcaatttcccaactctacaaccgtcaaggactcagtaattacctacagggaaaattaggagcagcagaacaagactaccttaaagcaatttccttggatgccgataatgcagatgctcattataatcttggcaatctttacgaggatttacaagattttgagaaagcacggaagcattatcaaatcgcagtgggaagtgacgttcctgatgcttacaataatctagctcgcttatacatccaggataaaaaatattcccaggctagagctttgctacaaaatggactagtaaaagctaaagaccttcccgaagtcagatacagcctgtttaaaaatttaggatgggtaaggtttgagcaaggcagatatgaagaagcacaactaaacttacaagcagcaattggtattgcaaataacccagaggtagcaaagaatatccaaaatactggtgcggcgtattgtatcttagcgcaggtaatggagcggcaaaaacaaccggccgctttggagcaatggcagaagtgctgtgaacaaggttctactctcaatgctgatgaagacacatggttgcatctagctcggcaaaaattacaaaaggcaggaagagtatgcaaatagaccggaaaaagattagtttcttagccattgtactaagcctaccttttatgacggtagcaacacctgggctgagtcaacagaatagtctaaattttatctccgaagttaagggagatgtcaaaattcaacgttctggacgcaagaaccatcaaaaagcatatggtggtgaactactagattcttctgattctttgcgattgggaaaaggtgcttctacaaaagttgtatgtaataacttatccatttggaatattaaatctccagggaaattttcagtctctagtggttgtccatccactggaaaaccagttcttataagaaatggtagtgaacgcgctccgactcgcgctcccaatgacccgacaattccctacatcattagtccgcgtgatacagcaattttgagtggcaaacctactctgcgttggaatgctgttaagggtgcaaccagctataaggtgacgttacgcggccctggtgttaattggacaactaatgtgaagcagtcagaagttgtttattctggtcaagaacctctacagccaggttttcgttatcgggtagttgtgactgctgataatggagcaacttctgagagtgatgcacctgttggattcaatttactgagtgagggggaggctcaacaggtaaaagctgaaattacacaattacaaaagcaaccgctaactgatgaatctaaaaatcttgctttggcatatttgtaccaaagcaagaatttaaatgctgtggcaattgatttattagcaggcttagttaagcaagaaaaccaaagcacagcagtttatcagcttttaggtagcctctaccaacaggtaggtttacatcgattagctaaagaacattacttaactgcgctcaagttagctaagacaaacaaaagtctggaagcgcaagcaatcatccaaaccagcttaggagaaattgatatagttcttgacaacttgcagcaggcgtttgagtcattgcaagctgctcaaaataactatcgtgccttgggagatgagcaacaagtacagcaactacagcagaaactagatgacttgaaaggaaggctaccatcatgaataacctgcgaactagacaattagtaaccctaacaattttggtagcaacagctggattatgggtgttaatgccaaagcccacaattgggcaatcaacccctcctgtttctgctgctcagtctgcggaattggcggaagtagaaagactcaatcaacaggtgattcaactttatgaaaaaggcaaatatagtgaagcaattcccttagcagagcgtgcattggctatccgtaagcaaaaactaggcgatgagcatccggatgtggcaagnnnnnnnnnnnnnnnnnnnnnnnnnnnnnnnnnnnnnnnnnnnnnnnnnnnnnnnnnnnnnnnnnnnnnnnnnnnnnnnnnnnnnnnnnnnnnnnnnnnnnnnnnnnnnnnnnnnnnnnnnnnnnnnnnnnnnnnnnnnnnnnnnnnnnnnnnnnnnnnnnnnnnnnnnnnnnnnnnnnnnnnnnnnnnnnnnnnnnnnnnnnnnnnnnnnnnnnnnnnnnnnnnnnnnnnnnnnnnnnnnnnnnnnnnnnnnnnnnnnnnnnnnnnnnnnnnnnnnnnnnnnnnnnnnnnnnnnnnnnnnnnnnnnnnnnnnnnnnnnnnnnnnnnnnnnnnnnnnnnnnnnnnnnnnnnnnnnnnnnnnnnnnnnn

SEQ ID NO: 859 - DNA, 27421 bp, Nostoc sp.
  variation 16052: note = n is a, c, g, or t
  source 1..27421: mol_type = other DNA
tgtgactttacccataactttgccgttactggaaccataactttgccgtcaacaacactacaaccctcattcttgcgtcagctaattttggatgaaattgacagtttggaaccataactttgccgctagtccaaattggaaggataagcttgccgtgagtccaatcaagcatagaaagcaggaaaacgccgaatttttttagaatggagcagaagcggtttatgctggtatgggatagagactttgggctatccatctgttctgagtaactactggagtattagaagatcctcctaaccactgagaacattaagaacattgtgaacaatagcctaaactggattgccagcctaaccaaagtagttggcgatgacaatgaggacaattttgcacaagaagatgttgatgtattaaacaagctctgacatctttaaatttttctcaaaatttccatctatgacagctatattaattcaaagtgaggaatatgtagacttaacatttaagctaagaggcgcaccgattcctcttgacaacggttatcttacctacgctgccttatcccgtatttgtcccccactacatgaactaaagtctattgggattcatccgattgctggaataccgaccaggaacaatttgcttgagctaactgctcaatctcgtctaaaaattcggatttatcatcagcaaattcctttaatttatccttatttagcgggtcaagcttttcatataggtcaaaatttttatcaactagatatccccgactacaaaccgttaatttcttcagaaagtgtctattccagattagtgataattaaagggttccaagactctactaactttattgaagctgtgcaacggcaaatggataatttaggaatacaaggaaaaattgaacttcttacccgacaagatggaacacctcaacgaagacaattaaccatcaataaagaagggaaacagtttaaagttagaggatttggcgtaaaaatcagtgaactcaatcctgaagattccttaaccttgcaagaacagggaattggcgggaaacgaaagatgatgtgtggaatatttgtcccagcgactcgcagcaaggaagaagaggaaacctgatgatagtctctacccaacccaaaatttccctatctctccatgctgcggatacgacaataatgcaccgcgtcggaatgaccggactttacatgactttaaagcgattggaaaagcaatatcccttatctcgtcaacggggaggacatatatcatggtttttgactgctgatactattgaattattctgggaaggaagtgatttcatcgccttatcttggttaattaatgagtcttttcaattagatgatacaggtttaattcatttagtaggattagacaatgatcgaatagatttaaggcagaaaatccatattcatgagggaatatgcggtgtttttctacgtcttaataagttttatcaagcaggagagataattaacactgaactaaggtttgaagaaaaacaagtcgagtatcaatataaatccctaacttggtacgcacatcaaacctttgcagagaagttatgcgaggcagatacccaacaactcagacatgattacattcaaataaccagttggttgtatttagggggaattgttcgccatgctcggacgcagaatactacaaaactagaagagaaacctgaatacgctttagcattattatttgtaccagtagtttgtcattattgcttacttcatataccatcagaagacttaaaagaaaggaaaccccatcgctacttggtggtgattccagaaataaaggattttgaagacgcttctcaaaggagatggcgattacagcaattagaaactaaacagtttcatgttagtagccttggggaagcaggattactttattacagcttagacgatattcagcctgaagtggcctactatcaagcttgtcaagtttggttatatgaaaaaacaaataaagcttctcgtcaacggacattgatgagtatagaagaaattaaaattgataagaatattttaatcacttatcaacaggtgcaaaaatactttaaaactaattatcagataattaaatataagcaaatttttattaaggtcaatccgattcgctccctgattgctgataatttagtgaaaggaatccattggtggtctaatttttgggaaaaattggtgatagaggattcaaaagaatatttatttaaccagttattttccaatcgagaaggattcatcataatggcagagaatagtgaagaagacaagcagtatcttatttttattaaggtatttcagcaagctatgaagggcaactttgctaaaatttatgccaaaacagaggaaggtaaagatcctccaattaagaagaaagttgaacgattaagggcagagctaaactattgttatgatgaattgtcgtttaaggaatatttgtctgactttttagtaagagggggattaaataagtattttaatgagcatcaggaagagattgcactactaattaaaaaatcaccttggcaagaaataagaatttggtcattgttagcgatcgccagttataaacccaaagataaactcactaatagggatgatagttcattgtcaaacaatcaaaaactagaagaagtgaatgatgactcagaagaagaatgacagtaatatcccaaattattatctttacggaacagtcctcactcgttatggtttagcttccttaaatcatgacattagacgaggaaataagactattctgcaaaaaggctattggaataatggtaaaattcattcttttgtaggttcaagtgcaattcgttgggcgttacgtttttatcttcaaaagcaaggttatttagttaatcgagtctgggatgaggaagaacatattaatcggttaacaagtgaagatttcgatccagaaaaattttatgatgatgatatttttgggtttgctttattagagtctgctgaaacagaggaggacacttcaacaacaaagagaaaaaagaaacaaacaaagaccagcactcctaatcagcgaatgggtgctttagggatgaatatggctgtttcgctaacgccttatgatggtgcagttaagttaggggcaaaaagtggcagagagaaggatagtacatctctccattttacagaatatcatgcaactcgatatcaatattattttggaattgatgccactcatctcaaagatttttcgcggattttacctatgatagatgggattatgaatctgcccaaggtaggagggagtagtaatatttttaattatcctttctgtcccgatagtttggtatttcaatggacaaatcattttgcttcatatatttcctattgctttgaatattgcgatcctaagagtaaggaagcaaaactttcacaagagtttatagatgaagtggaatgcggacagattgaccctagtaaattgtggattgggggaacaattgttaaggatttacagcaattggataattttgaaagttcccctttgaacaaggcgcatatttatcgtaatcgaaatgaaatgattgaagctttgaaaacagtcattaaaagagatttgggcttggaagaatcaaaatgattgcaccattaattctctatttggatgttccatttacgacttttcgggagtcccatgcaagggaaatgggaaaaacctatcctgttcctcctccagcgacagtgtatgggatgttgttgtctttggtaggagaaacgaatgtctatcgccactgtggggtagaattggccattgcaatgttatctagccccaaaaagtcgcgaattttgcgtcaaatgagacggtttaagaatgctgattttagccatccagagaatgttattccctgttatcaagaaattttgtctaatctgaagtgtttgatttgggttcgttctgacgaggaaaagatacaaccaagtttaagggagaggatacagttagcgtttgaccatcctgagctagtaagacggtttggttgtttatttttgggagaaagtgaccagttgattaaaacgatcaaacttgcaagggaagattatctagagggagtgagacagtgggcgattagagataatcgaggcaggttaactttaccctattgggttgaccatgtggggtcaagaaatacccgatttttgaggtatcggattgaggaaatggatagattatcacctcctgatttagcctggacaatggttcaatctccgatttgacaagtacccctgctggcgaggagaatcgaggtaaaaaatgacggaaaggattacagggttaagggatatagcaatttagataaagaaaaaggtgcttgcaaatccttgaaagagttagggggattgagttgtagaggttgaagaaatacaataaattgataagttttgtctttttgggatctctggctgaggggtacttgtaaaattgtgagtgagccttcatcactcaagggttttagcctttgctgtgagtcgtggctttatgccgttaggcgttgctcaactcttctctgagtcgggctgtttctttggttgcggtgagtcgtggctttatgccgttaggcgttgctcaagcgatcgctagcaagcgattcatctttttcaacgagtgagtcgtggcattatgccgttaggcgttgctcaatcttttactcggcacgatagccaagggataaagcagtgagtcgtggctttatgccgttaggcgttgctcaagggtacttttttgcttcaggcagcaactcaggaaatgtggtgagtcgtggctttatgccgttaggcgttgctcaattccctaaaacagaccgggatatcattttgtggacagtgagtcgtggctttatgccgttaggcgttgctcaaaattctgctctaggagcaataggcagtttcaaaacgtgagtcgtggctttatgccgttaggcgttgctcaatcttgcaacatgaagcggctaatgttattagccaggcgatcgcctgaacaacctttgcaattggcagagtttgacaagcaagtagcgctagaagctctttgtcaggggcagacttcctttttggtgcgatgcctgcggcgggctacgccaacgcattcacgaagtcttacaccaaaacctcaaacgctttagggagtaatattaagtactattacgctgcataaggatgtttattagcacttttatactgctgataaatatggataaatactatattactcaggttgtctacatcgctatcatcgtaggcatctacaggtaaacctgtgtcttcgctgtacaagtaatcataaataaaactcttaattgtggctcttgtagattccttatcccgccagttttctagttggtgtaattgtgatttcacggcttcaattagcgactgagcaacttgtttgatgcggtttctaattctggtatccaaattatctttagatgagcaaagcaagtcaaaaacggcaaggtgttcttcgcttaaaccttcgcggacagcacgggtgtcttcttcggataagtctttgacaagttttagcagttcctcaaatgtttgttcgatcgctactcgatcggtttcgcggttatagttttggataacttgttgatagcgcgtgtagtagtcaatgcgagatgggtttcgttgtaccattcgctggagttggcgttcgacagcttctttgagggtttgaactgaggtatttttagttggggaattggcaaattctgcttttaataactcaaagtcaattttgctaatatcgtaagttttgcctgactctgcacctggaagacgggaagtatcaacatttatgaactcgctaacaacaccttgtaaggaacggagaacagcgttgatatctagagatattttgtgttgttcgtgtaagtgtttgtaaatttgctcaatggcgttatatttaccttggtagggtgctgttaatttcggttcagtaattagcgcctgtttctttttgaagatttccctggctaatacttcaaagcgggcgcgagattcatcgttagtgcaaactgcgttaactgcacttgctaaagcagcaattttatcaaatcctgctgtttctagaagttcttggaggtcaaagcccagattggcgatgtggtcaatacaattttgcagtgcgatcgcataatcttcttgtaattggttcaggtcgttgtaaggtgttatactctcgtctgtgcttcctacttctgcacgggagtatcttgcaagggcggcacggagacttgttaaaataccgttgtaatcaattaacaacccgttatttttcccttcgtagatgcggtttgcacgagcgatcgcttgcatgagagtatgtccttgtaagggtttatctatatataatgtggcaaggctggggacatcaaagcctgttaaccacatggcgcagacaatcgcaaagcggaaagggtgtttttcgttcttaaattcttcttctagattgcgacttttgataatttggcgatggggaactatatctaaatcccaatctttgaaagttttaacttcattttgggcttcgctaatcacaactaaatattctgttgactgcaaccattgcaaatattgctgatgttctacttcctcttgttcatcaccagcttgtttgactaattgtttctgtgcttgtattgcttgtttccagtatttatcgataagtccgtgcattcgcacagccgtaatcttatctagacaaacaagcatcgcttttccggtttgccaacgttgggtatagtgagctactaagtcttgggcgattcggtctaaacgtttttcggcggtgaggatgagatattctccccccaagcggcgacggacggcttcttcttgttcagcgtcgaggtcaaattgttcgatggcggtggcgaggcgttgatttagttcttcgtcagctgcaacctggcgttgagtgcctttgtcgtcatagtataattcttcgcctcggttgtcgtagtagaggggaacagttgcaccatcttctacagcccgttggaagtcgtaggtggaaacgtagccgccgaaaactcgacgggtgagttggtcttcttccgactccattaaaggtgtaccagtaaagccgatgaaagacgcattgggtaaagcttggcgcatattttccgcgagtttaccgtattgggtgcggtgcgcttcgtcggagatgacgataatatcggaacggtgggagtaaatctcaccgggtttgttgaatttgtgaataagtgtgaaaacgtagcgatggttgtctttgagtaattcagctaattgttcaccactggcggcttgggtgttattttctttgatagcaccaacaccagcaaaggtttgcacgatttgattatctaattcttggcggtctgtgacgatgacaaaggtaaaattacctggtaattggcggtgcgctttgcgcgtgagaaatgccattgagtaagatttaccgctaccttgagtatgccagaaaacgccaagtttcccctctcggacttgccgttgttgaatggcggtaaatgcgcggttaacaccaataaattggtgattacgagtcagaattttgattgttttaccgctactgtcatcaaagaggatgaagttttcgatgatgtcgaggaaattgtctttgcggcacatccccattaacattgtttggtagtcaactttgccaagttcctcttcttctagacgtttccattcttggaaatggccgtagcgactggtgatgctacctactttccccactattccattactcaacatgactatggcgttgtgatggaaaatttcggggatagtatctttgtagtcggtgtagttgtcttcgtaagccactctgaccttgcggtgcgtggctttaagttcaataaatagtaaaggaataccattaacaaagccgataatatcaggtcgtttggaatagagagaacctttaatagacaactcccgcacaaccaggaaatggttattttctggtttttgaaaatcaatcactttcaagcggggattgatagtttcaccgtgtgggtttttgtagggtttctctaggataccttcacggataagttggtattttttctggttgatggtgattaattgctctgaaatattggatgtggtgaattgagcgatcgcatcgtcgtatacttgctgtggatgaccaggattaaatttctctaatgcttggcgaagatagcgtgtgagtacaacttctcgtttatctttgcgtcctagtgtaccgttagtgccgaatgtttcttttttgtatgcgtaaactgagtgccatttcagggtttcttcaaaaaagttagcggtagtttgttgcaccaggcggtcttcggaatactcggtactcatgggtgtgataggtaatacaggtagctattctaaaaatagccttgctgatggtaaagtagcaactatcacttacaatgcacgtaaataattatctaatttttggtttgtcttgtggatatccagtcgccagaatgtcaaatatgttattattgtgaatttgctaaaattttgttattatatatttaccctgctacttgcgaagtctcaagttccacttgggatacgcccaaaagcaatccttcgggatctgtcacgggcatagcaagagcggggcttttaagtttttgagttagattttgttttactggggtctataacaaaatcttcgggcttaaatagccagtgtcggtatggatgattccatttgttggtaacatctccatgcacagaagtactaactccgatattaaagcgcggatatattttgctaatgcgctggtagatgtgagtataaagtttttctttcgcaattgtacgcttggctcgaaatcttgcaccatctggcttttctttgtgtttattgttgagcctaaactgcattgcccccaaaactacgtctaagtattgtaatattgggtggttgtgcgatcgcacttcagctatctggttttcgtcaatgtaaatacccgcgctttcaagctggggatttttatttaaaccgagtaaaaactttttgaatctttcagctttttctcttgtatctggaaggtcatccaaatacatccgaagcctgatattttcatctgtttgattagagtattgcaatccaaaagcgtgtttaagaaattgataataaagcaaaaagtattcgttatctgtctgctcagtacttaagttgttaggaatattacaattttgagtaaacatgactctgattttgacgatatcggcttcgatgaagtcaaaaaatgcttccatcaaaccaatatatttatctaaatattgatatgttacttttgaccatttaatctcgttgtgcaaatttaaatcatttttcttcgctattaaaacttcctggacttcgcgcaagtcctgagaacgtagtaacgcaccaccataaaagtgagaaaagaaacgtcctttgtcaatcgattcgtcgcaataaattatgtactctttagacaatttcacctctcttatggtgatgctacccgcaagttaattgctggttaatttgtactatagtagcagcaaaatctctgaattacacagctatgcttccattcatgaggcgaggcaagagtaagtcgcgggcttctttgagtttttgattttgctccaatagttttggtactaatagcctagcaactgaagctttttcgtcaaaatattttctgagattttcatttggtaaaagaattggaacaacactaagaagctgtcttttgagttcagtttgaccagtggctccttctcctaaagtatcaaaataatcttgaagattttcaagagctacaccgaaaaaatgcttctccagctcaacttttggtctaactatagtaatgtgcgtatctactgttaggtcttcacaattagcaagaacctgagcaactctacctaaagtaccgatgcctgtactattaattaagacatctccaaatctgatttttttatgttctgatacttgagagtgatgttgtcgtgcaaactcgaagttgatttgataattacgaatacacttttgattcaggactatattttttgattctgaatcgtattttggagttatacctcttgtgattacctcactaagattacctatagaagacactttccacccctctggaatgccatcaactaccttcatcgactcataaccagggaagcgcgatcgcacaaaccattctttgtaaagctggtggatagactcttccagcagtgctattcggcggttgttgttgtcgatgaagcgatcgtaggttgagagaatgtcagctatgcgttgttgggttgcaactgggggaaggggaacttgtaagcgactaagaattttttgattgagatttgcaatattcgtacctccaccatacgcggatagagtttttcggatcaggtcagacctgaaaagatatgcaaaaaatctaggaaatgcttgatttgaagtaaatcttgtacgaatgcagaaacctgaaaatgtaatttgttctggaggagattctataaacaaacttcgaccaattaaatctttattcccattagagcgaacgaataaaatatcattattttggagtatatcttcatctttaactacaccttcagggttaacttcttctaattctttatatcgaggcatgatatagtttttaaagtttactacaccaataacctttatcccagtaccaaaattattttgattgtaattaataccatttctaaattctgctaaatctccaagttccacaattgaccaactcatcctattattgtcaactcctcaaaattcgccgcaatactcgccgccaactccaccgcttcctcattcaaactcgccaactctaaatgaatttcccgcattctctcctcaaaatcttcctcatcttccccatccaaagccgtcacacccacataacgcccaggtgttaaactactatcctgctgggttatttcatcccgcgttaccaccttacacaaccctgatacatccacaaacaccgcttcgggaaagcgagattgtaaccaggtaacttgtgctttcacatacagcgtagacttaatagcaaaaatagcttcatctcgcagtatatccagtgcatcacgttgttttttaacttccttcccatcccaaacatcttgtttccgcgcttctaattttttctccgccagttccacagcacggctagcgagtttatgcacttcgttgatgtgcttttgcagagttttcaattggggaataaattgtgcaaaccttgctgcacattctttttgcgcttcattagtagaaagggattcagcttgacttgcaaaccatgcaagatgcacttgtaactcaccaattaaaccaactcttgccgcagtaaattcttgaattcccgcttccaactcagacaaagtagcgcggaaagtctctatattctgattggcgatatcttcagcaactaatccctctacttccggtaaatcctttaataaaggaagcgaagccccaagactatcactaaaagtctgcaacatctgcgtcaacttaactaacggtgactccaactgtgtcaacacacctgcaatagtacccgcttcttggtgcgtcttatttaaataatcccccaccaaccctaaataacgttcctgctgaccgcgatacaaccaagcgatcgcagtgatattctggagttgttcttcactaaaatcgcggattttgcgcgtcactactcggtagacgttccgcgcatcaatcatcaacaccttatcttggcgttctgctggtttacccttgtcaaaaaaccacaatgtacaaggtagcgattttgtgtaaaaaaagttcgttccaatagagataatcatatccaccgcttgagtggcgattaactcctctcgaatctccttttccccatgtcccgcatccgatgccgaactcgccatcacaaacccggctctacctcgctcatttaaataactgtaaaaatactgtatccagaggtaatttgcattgctgactgctttagttttggcagcaattcccggtatctttttttcagtaaacagccgggagtcagtctttaccttctctggactcaccccatccacattaaacggcggattagacatcacaaaatcacattgacccagcaactcttcccagcgatcgtaaaaagtattaccctggcgaataatcccttctaacccgtgaaccgctaaattcattcgcgctaaacgggtgttagtatccgatttttcctgtccgtaaaaagtaatctttgcagctgcatcctcaccgcgattttccacaaaatgtcccgtctgcacaaacatacccgcactaccgcaagcaggatctaaaacatttccccggtcaggttcaatcatatttacaatggtgcgtaccaaagaaggcggtgtaaaaaattctcctccttcctgtgcgccactcatagcgaacttattcagaaaatactcataaattcgcccaaacacatcacctgtggctgtacgcaactcctcccggtcaaaaattcgcactaagttatacagcaaatcttgctcaaaactggtgtactccttcggtaacaccccctccaacatcttagtttcatcttcaatcgctttcatcgctgcattgattgccttgccaatatctgcgttttctgccaaattcaagatgcgatcgtattgagcctcaactggtaaaaaaattgctgactttcctttaaagtcatctatggtaatggggcgtttttttccaccccgcgaggataaacccttttcaatctccgcctttacagcattgaagcgatttgtcgcatggcgaagaaagattagccccagtacgggcatactgtattcattagcattgagtttggagttagcacggagttgatctgcggcttcccagagagaagattcaagttgactgatattgagcatagtttgttagcgacttaggcgatatgactgtctatttcgcctaaaaaattatgagtttacatattaactgttttgacaaccagggaatctgctattttttcccctagcccaaacaaatatacttagcacgtttaattccgcgatcggaattttttaacttaaaataacgtcccaaagacgataagcaaaaatacttttgacacactaggctttgacttgtcaaagccactaagcgtttacacctcatttcccctgacttggtggaattttgccctcagtctgagcttgtttaattgctcgtttcacaattaacactgccatctgagacaaagaccgctcctctgcatcagccaaaaattgcagggcttctttgtcttcttcttccatataaagagttacagttacttttcccatttcattaccataagcaatttagtgtgtttttagtttaaatacattaaaacacactgattaacacagaaacactttattttagcgtataattactgataagtcaaaagccagccatcaactttctcagggcggatgctggcttttggcccccatatcacaggagacattttccatgttaaagcctgttagctacaaaacagatcaacacagagcttatcaacaagctttagatgatttcggcatcacagaattactggcaaagctcaacaactactctgatgctgactttgatagtgcctggatacaactccagcagcaagaaatagaaagtctagctgcgattctgatttctcaattaacttacagcctcaatggtaagttgattgccgcttatctcaatctcatccgacacagtaaccaagatatagtcccaagcttgattaacctcaaatgcccagatgcatctattgagcttcccgctaactttcccgatgtagctaagacaccgagatttttatatggcgatcgcttgcgttggctctcaaccgaaagcgatactgactggggtattgtcattggtcgattttatagctttgcttgcgatcgctgctgctggagttggtgctacctgatttggttgagcaaagatagccccagtactacttggacttctgccgatattgcttgggaagaggatttagaaccaatcagcgaggaaacagacttatgaatcctcatccactcaagcagcgagaacaagatttgatgcaactctacagttactgtcaactgggcatgactccgaagcagttttactccaagtggcaggtgaactacgaacaaatggctcagatttgcgatcgttccctttccacggttcgacgctggtttgctagaggtaaaaactaccgccgccccatgccagccgatttacgccacctagcgctgatgaactttttgctggaacactttgaggatatccccgaagaagtgttgcagaagctttgttttccagacaagagtgagtaggaattgaatctaatttcaatatcaatttgatatttcttgccagccaccgtcacagtaggctggcttttgtcttggaaattacagattttaccaggagaattcgatgacttaccttaaaaagctcagtccttggtgtatagttcgacttaaacctaatatgcagaaccagattgtagctcgttttcgtcgccgcagtgatgcagaagctcatctacaagttttgcgccgactcatccctggcgtgagttttacactaattttcaatgtggtgttagagcaacaagatttgaatactgtaaagtgaatagcgatgcctgcggcgggctacgccaacgcattttactgttacctgacattctcacgcagacggaaactcgtttcgccacatccttaatcgccgaaacagcaattgcgaacacaaaaataacaaatgcgatcgctgaaatcacaattgcgaacacaaaaataacaaatgcagtggccgaaatagcaattgcgatcgccaaatcaataaatgcgatcgctaaaattacaattgcagtcgccaaatcaataaatgtgatcgccaaatccataaacgtgatcgcatccatcctctttttacctgaaactggcagtgggcgatcgcaaaatcagtatattgtctgttcacaagtaaaaaacactcatccacgaggttctttcattggcagaaacacatcatttgtgatgaaattctacacttttctgtaatttagggtgttggtgttgaatttttcttatgatctagttgcatctcacacccttacccatgaatgaacagcttcagcaagcctatctcagcctcattcaaagtctgttgaattgccatagcaacgatgaagttccagaaattttggtagcaaaccaagatttactagatattggcttcttgcagacgatagaagcagaagcacagaggttttcacagaaaggggatgagacgacagcgaattggttgcaaggtttggcaatgcaactaagggaagcgttgaatctagataataaagtagatttgccatctctcagtgaggaggagatacagacatattaccaattcttgatgcaggtactacaagcaaccgcagacagtaggggtaacgcgcaggtagtttaccccttgctggcaaagaatacagacaaactcgacggagtgttagcagaaatattgcgccattggggaacaaatagacttggggaagcaaaagcagatgaagcggaatatttagcagtagctattgtcgcatttagcaatctaattcagcaattccctttgggtagcaaagccagcaatatggaaattgccattactggctatgaagtcgcgttgacagtctacaccagagaagccttgccttttgaatgggcaggaacgcaaaataatctcgcaattgcctacacgaatagaattaaaggaaacaaggcagataacatcgaaattgcgatcgcttctcatactgctgctttaactgtctacaccagagaagctttgcctcaagcttgggcagcaacgcaaaataatctcgctgctgcctacagggatagaattaaaggaaacaaggcagataacatcgaaattgcgatcgctgcttnatactgctgctttaactgtcacaaccagggaagctttgcctcaagcttgggcaatgacgcaaaataatctcgctcttgcttactattctagaatcaaaggagacaaggcagataacatcgaaattgcgatcgcggcttatactgctgctttaactgtctacactagaaaagcttggcctcaagaatgggcaacaacgcaaaataatctcgcaaatgcctacagggagagaattaaaggggacaaggcagataacatcgaaattgcgatcgctgctttaactgctactttaactgtcagaaccagagaagccttgccttttgaatgggcagcaacgcaatataatctcgcaaatgcctacagggatagaattaaaggagacaaggcagataacatcgaaattgcgatcgcttctcatactgctgctttaactgtctacaccagggaagctttgcctcaagcttgggcaggaacgcaaaatgatctcgcaattgcctacagcaatagaatcaaaggagacaaggcagataacatcgaaattgcgatcgcttttcatactgctgctttaactgtctacaccagggaagctttgcctcaagcttgggcaggaacgcaaaattatctcggatttgcctacaggaatagaatcaaaggagacaaggcagataatatcgaaattgcgatcgcttctcatactgctgctttaactgtctacaccagggaagctttgcctcaagcttgggcaggaacgcaaaattatctcgcaaatgcctactattctagaatcaaaggagacaaggcagataacatcgaaattgcgatcgcggcttatactgctgctttaactgtctacaccagagcagctttgccttttgaatgggcagcaacgcaaaatgatctcggacttgcctacaggaatagaatcaaaggagacaaggcagataatatcgaaattgcgatcgcagctttaactgctgctttaactgtcacaaccagagaagctttgccttttgaatgggcacgaatacaagataatctcggacttgcctactattctagaatcaaaggagacagggcagataacatcgaaattgcgatcgcttctcatactgctgctttaactgtcacaaccagagaagctttgcctcaagaatgggcaatgacgcaaaataatctcgcttttgcctacaagaatagaatcaaaggagacagggcagataacatcgaaattgcgatcgcttctcatactgctgctttaactgtcacaaccagagaagctttgccttttgaatgggcaatgacgcaaaataatctcggatttgcctacagggatagaatcaaaggagataaggcagataacatcgaaattgcgattgcttctcatactgctgctttaactgtctacactagagaagctttgcctcaagaatgggcaacaacgcaaaatgatctcggatttgcctacagcaatagaattaaaggagatagggcagataacatcgaaattgcgatcgcttctcatgctgctactttaactgtcacaaccagagaagctttgccttttgaatgggcaggaacgcaaaattatctcgcaattgcttacaggaatagaatcaaaggagacaaggcagataacatcgaaattgcgattgcttcttatactgctgctttaactgtctacaccagagaagctttgcctattgattgggcaatgacgcaaaataatctcgcaaatgcttactgggatagaattaaaggagacagggcagagaatatcgaaattgcgattgcttcttgtactgctgctttaactgtctacaccagagaagctttgccttttaattgggcaggaacgcaaaataatctcgcaaatgcctacagggatagaattaaaggagacagggcagataacatcgaaattgcgatcgctgcttatactgctgctttaactgtcacaaccagggaagctttgccttttgaatgggcaggaatgcaacataatctcgctcttgcttactattctagaatcaaaggagacaaggcagataacatcgaaattgcgatcgcttctcatactgctgctttaactgtcacaaccagggaagctttgcctcaagcttgggcaatgacgcaaaataatctcgctcttgcttactattctagaatcaaaggagacaaggcagataacatcgaaattgcgatcgctgcttatactgctgctttaactgtctacaccagggaagctttgcctcaagcttgggcagaaactttgtcgatgcggggaattgctcttgctcatcaagatacaaacaagtttgactcagcatacaacgattttgagtctgctattgttactgtagaatctttacgggaagaaatagtatctggagaagaaagcaaacgcaaacaagcagaacagtttaaccacgtttatcgccacatggtagaagtttgcaggaaattaaataagattaccgaagcaattgaatatgttgaacgtagtaaaacccgcaatttagttgagcaaattctcgaacgcgactctaaaaacatcttccctccagaagtattcactcaattagaaaaatacagggatgaaatagccgtaggacaatatcaaatccaaaatggcaaagctgaaaatccccaagttctagcacaacatctccaaaagttgcgacagcagcgtaatgaattgcaaaactgctacttacccgttggttatggtttcaaatttaactcattccaacctactttggatgagcgtacagccattatcgagtggtatcttctcaatgacaaaattctggcgtttattgtcacaaaaagacgggaggtaacagtttggcaatcccaaccagaagatagaaaagctttggtaaattggataattcaatatttgcagaactacgacgagcaaaaagaccaatggatgaataaattaggggaagaactcaaacaattagcctccattttgcacattgatgaaatattaaaccagataccaaagcactgcgataaactcattctaattccccatcgattcctgcatttattccctcttcatgcaattccagtaaatcaaaattctaaaaattcgcgctgtcttctagatttatttgctggtggtgtgagttatgcacccagttgtcaactactgcaacaggtacaacaacgcaaacgtcctgattttaaatccttgtttgccatccaaaaccccacaggtgatttaaactatacagatttagaagtacaagttattcaaagttactttaatactgccaacgtcctgaaaaaatcggcagcaactctcacagcaattaatgattctgacttaaatacttaccactgcacccactttagctgtcacgggtattttaacttcacaaatcccggtaaatcagccctaattttggcgaatgcaccgatcgcagacatatcaacaaaacccaactccgaacgttacctgaatttacgagtaggggaaacccacgatttagaaaaatgtcttaccttagataaaatcttcgctcttaatttagaacaatgtcgtctcgtcacactttccgcctgcgaaactggattaattgattttgacaatgccagcgatgaatatattggattacctagcggttttctattagcaggtagtcctagtgtcgttagttccctatgggaagtagatgacctttccaccagctttttgatgattaaattctacgaaaacttattcaaacttgctcgattggaagcaggagatgttgccatagcccttaagcaagctcaaaactggctgcgaaatctgactattgagggattagacagattcttggaggaacacaaaacccagattgaaaaagtccttgctcaactaagagtaggacaacgcatcatatttcaagaatctttgaaactaatcaagcaacgtcaacccctaccttttgcaaatccctactactgggctggatttacagcatctggactttaagcaccagattcggggactttacaaaactttttcgcacctagtttaaacacgcaaatactgagtgcagttgctataccaggaggaatggaaataccaatagcgatcgcttctatagctggagcaagcaatccagattccaaggcttctctaacttcttcctgacagacaaattggcgggatttttccaaccaatcatttaatcctctatctgcttcctgtgcagtttcccgcataaccagcagtggaacggcatcgtctaaataaccttcacactcttcgatagtatccaaagctactaaagcctggggattatctgccaattcgctgcgaaactgactaatttcctctggtgtaacagtaatcatcgagttttaaccagtaaataaatacacaaaaaccttgggtaattatacatctaatgccgaatccagagatgtggtgctgacacgatatcaataatagaagtaattttggagtgcgatgtctacgacgggctacgcctacgcccattttcaacaaccagaaaaattcacctagatacttggttaattaacacatttttctggtgcttctataactttaattccagactaaaattcccgaacaatatcttgcccaattccttaaaatctgacccaaacaactggaatacactaatcttcgccttctcgcacacaggaataatcaacttcaccaaatgataaggttgactttgatttgttgttgaggctatcctcaacgattccatgattcctcctaaatctcccaataacttcacatcctttccaattgcttgttcaaacactaacaaaatcaattgtaattttcgggttaactcgatcgggatgggtttataacctaattggggagtaagtgcaattaattcgctaattccttgaatattaactcgatatttctctatttcttcttcgcctttaatttcctgtcctaaccacccgtaacaacgagaacaaaatcccgcaggtgaaagcctagccatcacaggtaaacgggcaccacaatgagaacattcttctattaatcgctgtttgtgaatcaaacaaaattctacgtccttaaatgaccatgataatggttcatagatagttttgttcttctgcatccactcttcacaacaacaaggacaccaagcgcgatagttccgaaataatcccttgtcataaatcattcctttccagcttaaaagggtcaaaaagcgtaaatcctgacgcattgttaactcttctaagacagtgactaacttttctgtcatttctcgcattccgttaatagccggtttagcgtcgctatttcccaataggtgactcagattttttgacaatagctcagatttatcctcatctttgagaataagtggcgcaatttctcccataacgagcttctcagaggttaaacaatgcgcctgcgctaaacgatggagatagctactaagactttctgcatagggagttcccactgccacaggttcaagagaaaataaccgactccgttgcgggatttctagaggatttaggctccaatgttctgagtaaatagtcatccctcttggattaacctaaacgctggtactttagttttaacagctaaattttagggattagtttgcgattcactcttaacctcgatgccgtaattaacaaagagatcggagacagatatctccaaagctgcggctaacttaacaatattttttaacgaagggttacgctccccggtttcgattcctgagatgtagttgcgatgaagtcctgacttttcagccagttcttcttgggataaatctagctctcgccttcgccgcctaatggctttgccaaagcggtactcaatactggggtgtttttgcgtcacaaaacaatactgaaccagtatcaccattaaatctatctactatcagtggacttttgcacaatataagtgttataaagttaagtagtatagcatcaggcaagcaagttcctaactttatggtcttattttgatagattcataaaataaagcgcaaagtgcttagtaaggagtatatgaaagagcaatttgaacaatgggttgctcgccttcaaatatccgaggcagggcaaaaaattattgagaaagttcgctcatctgagccatcccgtcgcgttggtggcggtagcaagaatgtttcgggacgctaccctagtcgcaagatgggagtcacgattcaatttgagtctcatcgggttgaactgccaattatctatcagttagaacatgataaagatgttctagaattctacgatcaaccaccgcaaattaaacttgactatcaagcaagtaacggacgtagattaggcgttttacacaccccagatttatttgtcatccgaaccaattcggctggttgggaagagtgtaaaactgagcaggatttgaaaaaactagcagagaaaaaccccaatcgttacttttactctgaagaaaataatcaatggcattccttgccaggagaagtttatgctaaccagtttgggctttatcaccgcattcattcagatcgcgaaatcaattgggttctgcaacgtaatttgcaatttttagaagattattatcgctcagaatctctagtagtggaagaagcgatcgctcaatcattacttgcaattgtgtcatctcaaccaggaatcactttagcagaattactcaatcggtcaacaggagctaaatctgacgatatctacaccttaattattcaagagcaaatctatattgatttaaatgctacaccactagctgaaccagaaagatgtctaatcttccgtgacgagcaaactgctagtgcttatagattaatggttgagcaaccaagtgtaagtcttccggctatctctcctgtagtcaatattgttactggagcaactgttagttgggacggcaaaggtttaaatatcatccatgttggagaaacagaggttatacttggcgcagaaaataatcagttaattgaactcaaaaaagctatatttgagaatctggttcgccaaggaaaaatcacaagtctccaaacaccagaaaaaacagctattagcacagaatcttggcagcgatttcatcaagctagtcctgaagaccaagcagaagcccttgaacgctacaaaactatcgaaccttacttaaacggacatcctccagaaaacgaaacaataccagcccgtaccattcgtcactggaaagctaaatatttaattgcaattcaaaaatacggttgcggctacattgggcttttgtcccatcgcagtgtcaaaggtaatcgacagcgcaagctgcccgaagacaccttagcaattatggagaagtttattttagaagactatgaaactcttaaacaaaaaagaatgtgggaggttcacgcggctttagttcgagcttgcgaagaagctggtgtaattgctccgagctataaagcatttaccaaagaagtacaacgccggactggttacgaacagactaaaaaacgccaaggtcgtcgtgccgcttatcagcatgaatccttctattgggagcttgctataactaccccaagacacggcgatcgcccttttgaaattgggcatatagatcatactgagttagatgtagagctagtttgctctgatacaggtcgcaatcttggcagaccttgggcaacatttctcgtagatgcttattcacggcgattgctggcagtttacctaacgtttgactcaccctcatatcgttcttgcttaatggtgctaagaatttgtgtcaagcgtcatggcaggcttccccaaattgtagtggtagataacggtgcagagtttcacagcgtttactttgaaacactactagctacttttgaatgtacaaaaaagcaaagacccccagccaaagctcgttttggttcggtttgcgaacgcctatttggaacttccaatactcaatttgtccataacttacttggtaatacacaaatcactcgtaatgtccgccaagtcactaagtcagttaaccctaaaaatctagctgtatggacacttggtttactttatgaatatctttgtgcttgggcttacgaagtttatgatacagacgaacatccggcacttttccagagtccgagggatgcgtttgctgcgggtatggcgattggaggcagtcgggttcaccgcatgattccttacgatgaaaactttcagattcttaccctacctacaacctcagagggaaaagcaaaagttcaagttggacgcggcataaaaattaactacatatactactggtctaatagtttccgcgatcctcaaattgaaaatacctctgtgcagataagatacgacccgtttaatattggcatcgcttacgcctttgttcgaggacagtgggtacagtgtatctctcaatattatgcagaactccaaggtcgttcagaaaaagaactgaagttagctagtatcgagttacgcaaacactattcaaatcatacacaacaatctaaagtttcggctaagaatttagcagaatttttagcatcggtagaagctcaagaagctctattagaacagcgttcctatgatgcagaagttaaggaagtctttagggtaatcgagggtggaaaagcgacaacaagccgtaacgaagaaccaaaacttattcaagttacttttgccaataccgattttcaagcggatgaagatgaagcgatcgtcccagaaacacttgtagtgtatgaggagttttaactatgacaaaatctactggatttccgcttgaactcctcacacggcctgctacagaaaggcttgcttactttgaaaattacaccgtagcgcatcctcgacttaaagaagtctatgaaattctcatgcgaacgattgccgaaccagcaggagcttcatttatctttgtttacggtgctagtggtgttggtaaaacaactttgcgactccgcgttgagcagaaattaacagaactagcattacctaaattggaaagcgatcgcgctcgtgttcctgttgttggtattgaagctatagcgccagaatcgagatacttcaactggaaagaatactacacacgcgccttaattactttggaagaaccattaatcgatcacaagtttgattacggtgtgcgtggtatctctcgcgataattttggcaaaattaatgttgagtcgaaagtagttgcacctgctctacgcagagctttagaaaatgctctcatccatcgtcatccagacgtattttttgtagatgaagcacaacattttggtaaggtggcaagcggatacaaactacaagatcaattagactgtctcaaatctttagcaaatatgacaggcatcttgcactgtctattaggaacatacgaactacttacattccgtaatttgagcggtcaactctcacgtcgtagtgttgatattcatttccgccgttattgtgctgatagcccagaagatgtacaggcttttaagagtgtgttgttaacttttcaacagcatctgccactagcagaaactccaaatttagtcgatcattgggaatatttttacgaacgtactttaggatgtattggcacactgaaagattggctgaagcgtgttcttagtgatgctttggatcgagaagcaacaacaatcactctcaaagatttacaaaaacgtgctttgtcggttgctcagtgtcagaaaatgttcaaggaaattcaagagggtgaacgacaattatctgaaacagaagcagatgtgcaaaacttacgctctgcattaggacttggcgcaaaaccaattgtgctacccgaagaaaccccaaaaactactcgtccgccaggaaaggttggcaaacgcaaacctaaaagagatcccatcggagtgcagcaagatgttagctagtgtattagaaacatacgaatcttggaatttaaaaaagccattaattccacaacgtagtcgcctctatcaacctcaacctgtaggtattgggactccttacatagagagtttaacaggttatatcacacggatagcagagttgcatggagttcttccaggagtcttgatgactagagaaattgctccgcttgtcaataaaatatatttccaaaatggagctaatcgaggttttcgtgaaatattcaaccgtagtcaagcgttaaatggcatgggagagatggcagcagatttagttcaagtgttgcaaaaattgacgcttagagatgacttgcgttttttaaccatgctgttttggtctaacattttgactccacgcaatttatttcgtaccagaaaagcttggtgtccaatttgttatcaagagcggcatcaaaatgggctggtagtctatgagcaattgctttggacaattaacctaattacaatttgcccgcagcatcaaaaacccttggttgaactttgccctcactgtaatcatgaatcacctttgttaaactggcgctcaagacctggttactgttcaaagtgtggagagtggttaggcgcaaatcaatgccttaagacatttacagatggtgaaggatcaataaaattacagttggagtggcagtattggactgccaatgttgtaggagagctaattttagcttctcaatgctttgaatctgccccatcaaaagaaaatattacaaaatcattaaatatagttattgataaagttgcggaaaataatgcagctgcattttctcgtcttattggagtaccaaaaaatagtttgtggatgtggcagtctactaaaaccttgccagagctaaatacacttctgaaaatttgttacgaattagagatatcgttggtagaatttcttactccaaaaaatctaattactaaatcttttacaaaaatctcgcagaagcacctccaactttctcgcacaccaagggtatctccaaaatctttcgaccaatatcaagtaaaagatgctttattagcaatacttgcaggtaatgaagaaccaccaccaacaatggaagaagttggaaagcgtttaggtcatcacaacagaactatttctagacactttccagatttgtgtagtgctatttctgctaaatgtcgtaattacaataaagcttgccgtctcaaaagcatagaaaaactttgcagcgaagttagagagattgtccttagccttaatgctcagggtgtgtatcccacagaaggtcgtgtttgtgaattaatgccaaatccggggtgttttagatataaacaagtccgcgctgcttttaatgatgcacgacgtgagtttggtttgtaagctgttatatgtaaaactagaacagcttatataactggaaccataaccttgccaccctttattggaagcataagcttgccgttgcggcaaagttatgggtaaagtcaca

SEQ ID NO: 860 - DNA, 32767 bp, unidentified
  misc_feature 1..32767: note = Synthetic
  source 1..32767: mol_type = other DNA
tgtgactttacccataactttgccgctactggaaccataactttgccgtcaacaacactataaccctcattctcgcgtcacctaattttggatgaaactgacagtttggaaccataagtttgccgttagtccaaattggaaggataagcttgccgtaagtccaatcaagcatagaaatcagaaaagtgtataagtataaaaaagtcgtacaattttctcaaaattcgtcatattgataaataaaaaagttgtacaattcctcaaactttagccttgtaaaggtttggaactatttactataagactcaatggcgatcgcattccgcgcaaactcaagctgttgattcagctttgtatttagaatgcgtaggcgtagcccgtcgtagacatcgctctccagacaaagaccagatgaattgacaagccaaggcgcagacagcaattctcaatcgaaaatggtattacttcgacaaaatcatgctttggcgctgcgatcgctttctattaaaaaaagtgttccctgagcgaagttgaagggaacactctcctgctgaattttcataattcttgtaaaatttgaacagcagttaatgtttagatcggcaaataccagtgaagcgatgcttgggttgggctgcgcctacgcgtattttaatcagtgcattgtttgagttttagaagcgatcgccccaaaagtgcgatcgcagtaccagtaattgatttccttaagcaaaaccttccctgagcaaaaccttccgtaaacaaaacgttccctgagcggagtcgaagggaacattctaattgctctttgtaccaatgccatcgcagagagtgcgatcgctcacattgggatttgactgtaaataaacacgtagcctagcgcaactgtagactattaaatcatctaggttatttgggtataccttccagagcttgatgctcttgtcaccactagcagaagcgatagtcttgccatcggggctaaatgcgacgctaatgacctcagagctatgccccttgagggtagagattcctttacctgtagacgcattccagagtttgacgctcttgtcactactagcagaagcgatggttttgccatcggggctaaatgttacgcccctaaccgcagagctatgctccttgaaggtagagatttctttacttgtagacgcattccagagtttgacgctcttgtcaccactggcagaagcgatagtcttgccatcagggctaaatgcgacgctaatgacctcagagctatgccccttgagggtagagattcctttacctgtagacgcattccagagtttgacgctcttatcaccactagcagaagcgatagtcttgccatcagggctaaatgcgacgctagtgacctcagagctatgccccttgagggtagagattcctttacctgtagacgcattccagagtttgacgctcttatcaccactagcagaagcgatagtcttgccatcagggctaaatgcgacgctagtgaccgcagagctatgctccttgaaggtagagatttctttacctgtagacgcattccagagtttgacgctcttatcaccactagcagaagcgatagtcttgccatcagggctaaatgcgacgctaatgaccgcagagctatgctccttgaaggtagagatttctttacctgtagacgcattccagagtttgacgctgttgtcactactagcagaagcgatggtcttgccatcgggactaaatgcgacgctaatgactgcaaagctatgccctttaagggtggagatttctttacctgtagacgcattccagagtttgacgctgttgtcatcactagcagaagcaatggtcttgccatcggcgctaaatgcgacgctagtgaccgcagagctatgccccttaagggtagagatttctttacctgtagacgcattccagagtttgacgctgttgtcatcagtagcagaagcgatggttttgccatcggcgctaaatgcgacgctaatgaccgcagagctatgccctttaagggtggagatttctttacctgtagacgcattccagagtttgacgttgttgtcatcactagcagaagcgatagtcttgccatcggcactaaatgctacgctaatgaccgcagagctatgccccttaagggtggagatttctttacctgtagacgcattccagagtttgacgctcttatcaccactagcagaagcgatagtcttgccatcagggctaaatgcgacgctagtgaccgcagagctatgccccttaagggtggagatttctttacctgtagacgcattccagagtttgacgctgttgtcactactagcagaagcgatggttttgccatcagggctaaatgcgacgctaatgaccgcagagctatgccctttaagggtggagatttctttacctgtagacgcattccagagtttgacgctcttgtcactactagcagaagcgatggttttgccatcagggctaaatgcgacgctaatgaccgcagagctatgccctttaagggtggagatttctttacctgtagacgcattccagagtttgacgctcttgtcatcactagcagaagcgatggtcttgccatcggcactaaatgctacgctaatgaccgcagagctatgcccttccaaacggtttagctcttgagtgttgtaaattgctcgctggattgccactacagcttgctggttagctgtttgttctaaattagcatttttaattggtctacctgaaagttgtctacctgactctatagctgcaaccacagcctcaagttgcctgttagaaactagagaagtttcggaaatttgcgatagagcaatggcactttgttgtgttgcttctttggctttgtttcgcgcgttccaccattgataacccgcaaagatagctactccagctaaccccatactaaacaagataacaactcgattttgccgccgtgctgctgctaacttttcttgttgacgttctttctcttctcgctcaagccgatcacccagttgttgactctcctgaatgtactcctgggctactccattcagcatttgccaatcacggaatctagttagatatgcttctgctactgccaatctatcatcctttctaagaaaccctggctttttgtcattcctctcccattcttctgcttccgcttcaatctgtcgctcaatggctattcctaacttatattcctctttccaatcccgcaacatttgccaatggcggatcaaggcttcgtggacaacatctaaaattacatcctgggaatccggctcatctctcttcgtgattaatcgtgcatctttatcggctaacttctcactcacctgttgcaaaagttccaaagaatgatgcgaattaaccaactcccgtaaacgcacgcgtcgcctgacatctgtggtttctcccatttgcgtcaattcgagaaaaatccgccgcgccacagttttttctgttgctgaaagactttcataaactgcatcggcgcgtttttgtagcgttccttcaaccccgcctaaatcctcataagttttaaggctgataacctcatcgccttgatttttcgactcacgccacaattctgtcaaggtatattgcagcaaaggcaaacttccggggtaatcttcaacatcattaattagttgctgttttaaccttccctctatgcctaatcctacccaatcagccggtttagtaattgcttcttcaatttcctcacgggttaagtgttcgacgttgatgtaaggtttatggattctgcccgcaaatttgggatattctcgccatctcccccgaaaatccgatcgcatcccaatgaaaatatagaggttatctgtacagtcaattaattctcgcaaacagtcaaagaattcttggcgctggctgtcattgcacatagtaaagcattcttcaaactggtcgataatcaagataactggtgtgtttaatgcttttaactcctcgccgatgacatgggcgatattttccgttgtcccgcctaacttttgagatccccctaaatcccccttcaaaaggggggctttaagagactcttcgccccccttttttaaggggagccagcgcggtcttggggtctccccaagtggagcgactggcgtgggttggggggatctaagactttgaaaacacatcctaggcaaggaaagtgcaaaagcctcctgtaaactgttaacaggagattctttaggcgtaaatggagtaatataagtccagcgatcgctccctggaatctcttgtcctagcttcagttggtagagtaacccagcccgtaacatagatgattttccactaccggaagcacccaacacagcaatgaggcgatgcttatctcttacctgtttaatcaactgcccagttaacgcactccgcccataaaaaacctcagcatcttcctttgtctcggtaaaatacgacagcgaacgataaggacacttatcctgaaagcttttttgcgaaaacttagttgtcagcagaatggctcgtggcgaattggcaattaacggacgctggactgtattcggcattcggctgataatgaaatctgccaacttgtggctattaatgatcccatctgcgtcattttccgggttcaatcctgcaagtaacgcctgcgtcatcaacccctgcgcgtgaggaatttccactccagtttcgtaggaacgggttgcagtaattaaacagtagtctttatctgtgggaataaattttaacaattcaccgctatagcagcaatctagccaaacaacgactcgtttagcctgacttctttgcaactgctcacccaaccaacttaagggaataccatagacttctgcttcaggtaaaacatcactggtagctagaaatacttcttctttacccgtcacagttttgcaccacccatgtcctgaaaagaagaataacgcagtttctggcgtggggttaggaggaggagggttgaaaagattagcgatcgcttctctcaattcttgcaccttaaccgccccttggcggtcaattttactttctcccttcgggtttaaagttctaggtaaacactgagcgcgaaaaggtctataaccgtattgttctaattgttcggcaattttctctgcatcctctgctgctgccgttagcggctttagagtggtgtactctggataataattaattccaataacttgagcagcccattccgatgccatttttattacctgactgactctgataactttttgattgaactgtaggcaaaatctgtccacagcattcgtttaggttgtatgaaaaatcactataatccagtgcaataaactagattaatttccccaacaaaaggtataataaacaaccttttatttagtaaattattctttttaaacataaaaaatcaaaacagaacatcaaatatatgctgtaattatctcactgaaattacgtttatactagtcgtagtaagtttggtataaaaacctatgaatacaaaggctgacaatactatcatcgcttttctcttggcgtttcaagacttaaaaactgcccttggagaacaagagaaacaaaatttaaaagaagttgccaagcaactagacacccaacctaaagcttgggaagactatattaaaggacgtttattagaaataattactcctaatcctgacttaaatcagtcttatcaattgtataaatctcaattagataatctagaagaaattcctgacgatttacttcctactgaagcagagattagtaggctcaatactcttgaaaagactccaataactagaggctttaaacccaaatatgaagctacaggttatgaaacccaactcaataatgttgtagtcattgttggtaactcttctcaaccagaagaaacagtgaaacaagtcaagtttttagaaaaatggaaacaatttttatctcagtccaatcaatcaaattagttttgcccttgtgatgagcgatttaatctatcctaccctcgatttgtttttatatgctttaaaaacttctttaaacacaactgatgcagaaacacaaaaaaaacaagcagcttttttagagcaattaccctctgatactcaattctacgatcctgacagtgaaaccgagtatctagagattacccatcctcctcaaattaactttatttcccaaaataaaagtttagaaggatactattatactgttagattaaatgacacttatggcttgcaaattgattgttctattaataatcaaatcgaaactcaaccagctaagtcttttgcaatcttaaaaactgaaatcgaacaaaaactcaataaagaactggcaataattggaaaaacctggttcctttctggttggctgccagaaaactcatctcaaaatcctgaagagattgccaaagattgctattatgctttatttaaagaaacttattggcaaccagaaaaagggacttttttagacggaaaagtttttgaagtagggcgatcgcaatatgtaaatcagagcctaaaaaacttaacaacttttctaaatagtaatgaagatcatgtgattattattatttataataatcgagagagcgcagaaaaagctgcggaattttataaagattggatgggtttattttgttatcgaagtaaaatttcgtgggcttattggcaaagtcgtttagtcaaagattctctgctcaaccattataaaaaaattgaagaaaatagaaaaattactaaccaaagtaactatttgcaagaaaagcaaaactttgtcacttctcgcaaaattttaaataacgttgataacattcttcagcaatacacaatcgacttactaaacctctctttccaaaaacaaattattgaaataaatttatctaattatcaaatacgcttggctttgattaaagaaaaaacaggcggaaacaatcagttagattttttagaaaaatttagcgaactagccaacaaaaaatatttaccacaaattaccaaagatatcgaaaatatgcagcttggcttgcaacttttagaagatacaattaaggctactcgcagtcgcatagaagttgaaaaatctgaacgagagcgtaatttccaagagcttgtagctgttgctggtgctgggatagcaaccgtatctctgctaaaagagcctgccaaagatttttgtaataaagaaagtataaaagatatctttcaatatattccttctttttgcgactaccctttcagtgccagtctgatgattggaataattgttagttttatggtttggtggctgagaaaacgattgcgataagcgttcgcgttggcgctcgcgaagcgtctcgttggcgcagcttctagtagagaagagaagctcaagccttctcctttggagacgctagcgcgaacagcgagcgtgaaaagatgtaatattttcggtattagattcctgttgtattgctctcagaaaaatttctgtagatgcttgtatattcacttacaggataagttgtataagtatcttatgtgttatacgacttttttattgttgtacaaaaagcaccgaatttttttataatggagcagaagcagttcatgctggtatgagataggaacttttggctatccatctgttttgagtaactactggagtattagaagatcctcctaaccagtaagagtattgcgaacaatagcctaaactggattgccactctaaccaaagtagtcggcgatgacaatgaggacaattttgcacaagaggatgttgatgtattaaacaaactctgacatctcaaaatttccatctatggcagtcatattaattcaaagtgaggaatatatagacttaacgtttaagctgagaggcgcaccgattcctcttgataatggttatgttatctatagtgcattgtccaggatttgtcctatccttcacgaactagagtctattgggattcatccgatcgcaggaataccgacaaggaacaatttgcttgaactcactgctcaatctcgcctcaaaattcggattcatcatcaacagattcctttaatttatccttatttagctggtcaagcttttcacataggtcaaaattattatcagctagatattcccgaatacaaaccgttaatttcttcagaaagtgtctattccagattagtgataattacaagctttcaagaacctattaactttattgaagctgtgcaacggaaactagataataaaggaatagaaggaaaaattgaacttctgacccgacaagatggaacacctcaaaaaagacaattaaccatcaatcaaaaaggaaaacagtttaaagttagaggatttggcgtaaaaattagcgaactcaacccagaagattctttaaccttgcaagaacagggaattagtgggaaacgaaaaatgatgtgtggaatatttgttccagcgactcgcagcaaggaagaagaggaaatctgatgatagtctctacccaacccaaaatttccctatctctcgatgctgcggatacgacaataatgcactgcgtcggaatgacgggactttacatgactttaaagcgattagaaaagcaatatcccttatctcgtcaacggggaggacatatatcatggtctctgactgctgatactattgaattattctgggaaggaagtgatttcgtcgccctatcttggttaattaatgagtcttttaaattagatgatacaggtttaattcatttagcaggattagacaataatgcaatagatttaagtcagaaagtccacattcataagggaatgtgtgctgtttttctgcgtcataatcagttttatcaagcgggagagctagttaacactgaactagaggttgaagaaaaaaaagtcgagtatcaatacaaatccctaacttggtacgcacatcaaacctttgcagagaagttatgcgaggcagatacccaacaacttagacatgattatgttcaaataaccagttggttatatttagggggaattgttcgccatgctaggacgcagaatactacaaaactagaagagaaacctgaatacgccttagcactattatttgtaccagtagtttgtcattattgcttacttcatataccatcagaagacttaaaagaaaggaaaccccatcgctacttggtggtgattccagaaataaaggattttgaagacgcttctcaaaggagatggcgattacagcaattagaaactaaacagtttcatgttagtagccttggggaagcaggattactgtattacagcttagacgatattcagcctcaagtgggctactatcaagcttgtcaagtttggttatatgaaaaaacaaataaagcttctcgtcaacggacattgatgagtatagaagaaattaaaattgataagaatattttaatcacttatcaacaggtgcaaaaatactttaaaactaattatcagataattaaatataagcaaatttttattaaggtcaatctgattcgctccctgattgctgataatttagtcaaaggaatccattggtggtctaatttttgggaaaaattggtgatagaggattcaaaagaatatttatttaaccagttattttccaatcgagaaggattcataataatggcagagaatagtgaagaagacaagcagtatcttatttttattaaggtatttcaacaagctatgaagggcaattttgctaaaatgtatgccaaagcagagtcaggaaaatatcctccaattaagaagaaaattgagcgattaagggcagagctaaactattgttatgatgaattgtcatttcaggagtatttgtccgactttttagtaagagggggattaaataagtattttaatgagcatcaagaagagatttcactattaattaaaaaaacacattggcaagaactaagaatttggtcattgttagcgatcgccagttataaacccaaagataaacccacaaatatggatgatagttcattcccaaataatcagaaagtagaagaagttaattatgagtcagaagaagagtgacaataatatccccaattattatctttacggaacagtcctcactcgttatggtttagcgtccttaaatcatgacattagacgaggaaataagactattctgcaaaaaggttattggaatggtaaaattcattcttttgtaggttcaagtgcaattcgttgggcgttacgtttttatcttcaaaaacaaggttatttagttaatcgagtttgggatgaggacgaaaatattaatcggttaacaagtgaagatttcgatccagaacaattttatgatgatgatatttttgggtttgctttattagagtctgctgaaaccgaagaggagacttcaccaccaaagagaaaaaacaaacaaacaaaagccagtactcctaatcagcgaatgggtgctttagggatgaatatggctgtttcgctaacgccttatgatggtgcagtcaagttaggggcaaaaagtggtagagaaaaggatagcacatcgcttcattttacagaatatcatgcaactcgatatcaatattattttggaattgatgccactcatctcaaagatttttcgcggattttgcctctaatagatgggattatgaatctgaccaaggtaggagggagtagtaatatttttaattatcctttctgtcccgatagtttggtatttcaatggacaaatcattttgctccatatatttcctattgttttgaatattgcgatcctaagagtaaggaagcaaaacttacaaaagagtttatagatgaagtggaatgcggacagattgatcctagtaaattgtggattgggggaacaattgttaaggagttacagcaattggataattttgataattccccttttaagaaggcacatctttatcgtaatcgacatgaactgattgaagctttgaaaacagccattaaaagagatttggggttagactaatcaaaatgattgcaccattaattctctatttggatgttccatttacgacttttcgggagtcccatgcaagggaaatgggaaaaacctaccctgttcctcctccagcgacagtgtatgggatgttgttgtctttggtaggggaaacgaatgtctatcgccactgtggggtagaattggcgatcgcgatgttatctagccccaaaaagtcgcgaattttgcgtcaaatgagacggtttaagaatgctgattttagccatccagagaatgttattccctgttatcaagaaattttgtctaatctgaagtgtttgatttgggttcgttctgacgaggaaaggatacaaccaagtttaaaggagaggatacagttagcgtttgaccatcctgagctagtaagacggtttggttgtttatttttgggagaaagtgatcagttgattaaaacgatcaaacttgtctcggaagattatctagagggagtgagacagtgggcaattagagacaatcgaggcaggttaaccttaccctattgggttgaccatgtggggtcaagaaatacccgatttttgaggtatcggattgaggaaatgccaagctcaccacctccttatttggcgtggacgatgattcaatctccaatttgacaagtatctcttatgggaaagggaatttaggatcaaagaatggcgggaaggtttacacggtaagtgatatggtaattgaaacgaggaaaaaggtgcttgcaatttttgggaaagcttatcggcactgggtttgaggggctgaaagtaagggaaactttggtaagttttgtgtttttggtttctcgatctggaaggtacttgtaagattgtcaatgaagcttcctcagttaagggttttcaactttgctgtgattcgtggctttatgccgttaggcgttgctcaacagcagggcggtactttgtaagctttgtggtggaacgtgattcgtggctttatgccgttaggcgttgctcaagtatctctcggcgtaccttggggaattggcacagtagtgattcgtggctttatgccgttaggcgttgctcaattgaggaggcgattaacaactggaagcaggttacacgtgattcgtggctttatgccgttaggcgttgctcaaggaaggcttcatttttacttgttagtgaatttatcgtgattcgtggctttatgccgttaggcgttgctcaaccagaaccaataacaaataaagatggaattacgatcgtgattcgtgcctttatgccgttaggcgttgctcaattcaacctctccctgaaagacctaatgctgttgctgtgattcgtggctttatgccgttaggcgttgctcaaggatttatcttgaaggatttccaattgtacagggatttgattcgtggctttatgccgttaggcgttgctcaaatatcgaggtcaaattactgactgcgatcgcaaaagtgattcgtggcttgataaggttgggttattccttcagcaacttccgctgaccttcgctggtacggttaaagatgcagaaccagggcgtagcgtaactcctatgagaggaacgaaaattaactttggtaaagctgaaggtgaaattcgacaatgagcatagaagagttagagtcagcttgattactaaatatcaaaaatgcgatcgcataaatttttgctgtagtagaagttttcaacttaattttgaacttatttaagtatcccaaacctttatgaggaaagggttacaaaattgttcagccgttttattcgatgttttcgctgacaagcaagcctactacagagagtacgcttaaattgttcaacctaattattcctctacataagaaagagacataaactgaatcacgtctccaagtgatgggataaatgctttgtgtgttatgctgcgtcggctaccagtaaaccattaacagcgatgatgattatttgtgctgctaaaggagtatcacaacatggtctatcatccctattacagggttgtgctacccatttcccctctagattttggtagaaagtgccaagtagttgagaaccattccagacccgatagagttcacccaagtcatctgctactgagtcaatttcaatttctggtgctaccgggtcggcaaactggtcaatatattcctcaaactctgattcagctaaggctgagttgctaaagtcatcttgtacaatcatcatgagtgacctcattaacggggttgaacaaaaggcgatcgcaatctttggacggagggcgatcgcttttttgatttcattaaacatattagttactttagtagctaaaatcaagaagaatattcaaaattttaattagtcacttcgacagtactgagaaagtcatttaaagaaatatctaatgcagcacaaatagcctccaatactttaatagagacgctttcagactcaccatactctagttttttgaggttttgatgggagcattcccctcccctggctgcaatttcatcagctagtttttgacgtgatttctttccccgtaatcgctttaaaagcattcccttgtcttgattccaagcaactgctacaacatctgcaacataaatatacattctggtttttttatcgtccttattgctcatatagtagctacagcagtaaacaaaatataaaattttgagctactacagtttacaaactcacgcggttaagtacccgcacataacagaaataacaagcgtagcttgagtgccacaaaaattcatagatattaaacagctaccagccattgatagaaatgttcgtcattcgcatcagatggctggtatttatttatctagttatgtataaatgaattagggtttttattttaattctcattcttcagtaaggtgattccaacaaaataatatggtataggcagactaacgaagacgaaactcagtcacttgtagggcagaaaagcaaaagatgccgcgaaacgagcagcaaacgtgtcgagatattattgaacctgccttaattcaggcaggctgggagtttgacagggaggtggagattggccctggtaaggtaaatttgagtggggagcagatgtatgacccgacacaaaagattgttgctgactacgtgctacgtctgtcacgaatgcctctggcaattttagaggcaaaggctgaacataaatctgctgctgatggaatgcagcaaggatcgcgttatgcccaacggctaggactgcggttctcaatcgcctctaatagccaagaatacatagttactgataatcacacaggtgcttatcagcggttaactcaggttcctacgccctgggaaattttagatcgactaggacgctccaacattgattgggatgcatggcgacctgtatttgagtacccctggtacgaagatcagattactcgccggagagtgcgcccatatcaggagatggcaatctttgaggtacttgaccgctttagccagggaatgacccgtgttctgctgttaatggcaacaggtacaggcaagaccttcactatttttcaattagcctggaagctgttgcacggtaatgtgttgcagaacaacagaattttatttgtcaccgatcgcaatagtcttaaagaccaggcttaccgggcgttcgcaggatttgcttctgatgaacgggtggtgattgataagaatacggtacgtcggaaccagcaccaggttggcaagcttttcttcgcgaattatcagaatttggatgaagaattaaatggtaagaaaatttacgagtattttgagccagatttcttcgatatagtggtagtggatgaatgccatcgttctggatttggcgactggtttggggtattagagtatttcggttctgcttaccagttaggcttaacggcaactccacgggaaattgacgatagtggtcgtccgttaactgaagaggagcagcgacgggatacctacagttattttggggagcctgcctatacctattcgttgaagcaggcgattgaggatggctacctagtcccttatctgctggaagagcgaattagcaacgtagatgcagatggatatacagggcctgatggcaaacgctatacaacgaataactttgagcgagagatccgtttgccagaccggactcagtttattgctgaggatttgtggcaaattttgggtcgatatgggctacgccaggagaagactatcattttctgcgtggatgagacccatgcggcgttcatggcacaggaactccgccggatttcgggtgataataattatgctgcccggattacgcgatcggagcgcaattctcaccaacttgaacggaactttgcggaaattggctcaggtaatcctcgtgttgcagtaacggttgatttactcacaactggatttgatgcgccagatgtgaaaaacatcgtctttacccgtccccttaagagttccatcctttataagcagatgaaagggcggggaacccgactttgtgaagacatggataaacggtacttcacgatatttgactacgctggagcgagccatctggaggattctgagtttgatggacatccagcaaatacccaaaagccaaaatcgaagtccaagtcttcatctggctctggatctactcacagggcggaagatacaactcctaagcctgttgctgagggtgtatcagtcatcctctccaatacggaacgctatgtctgtttagctgatgggcgtaagattccttttgatgattattgtgagcaatcgaaggaaattattcgcagcatttctagtgcaacattagatgaactattacaaatctggattgaccaaagcagccgaaaagaactttatgaagaattgaaggatcgggatatttacatctctgctttccagcactatcttgatttagatcacacagacggagtagacattctagccaaagtagggtttgacctggtaaaggttccgactcggcacgatcgcgtagtgcgtttttgggatcaggaagaatattggctcctgaatcaggtagatgaacacgacattccagaggaggagcagctaaagtcccggttctggcaagcaagcttagatcactatgccttgtttggcattgacgacttggagcggggagctacctacagtgcgcctcagtttgttgccttatttggtaatttcagtagtatgctgagacgctatggtggcgcatttgccctcaggagcgacctggatgcagtgaagcatcatttatatgtgccgatggtagcataaggataacgaatggtagggacgactataggaaacgggacagtagatcatcgccgccaagaagtgcagcaggcggtgaagaatgcttgcgatcaactaaatagtgacggggtaactcctcgtgactatgttgagcaattggcatggctgtttttcttaaaggcatttgacgagattgagcaacggcgtgaagatgagggagcatttgaggagaaaccgtacagccgacttctgaatggtgaatttcgatggtctgagtggtcaaagaagactgacagacctgacgaaatgttggaatttgtcaacggacgtttgtggcggcatttacaaaacctggaaggggatggagcagccgaacggattaggcggattttttcgtctattaaaaatcattcccgtcgcggaaccagtttcgcccgtgtcgtgcagcagattaaccgtttgcacttcagtgatgatactgatgtaatagtgctatcagaaatttacgaagatttgctgaaacgggtagcaggtgattctgctgggtatgctggggagttttatacccagaggcatctgattcgggctatggttcaggtagtacgtccaaagatgggcgatcgcatttatgacccgtgctttggtacagcaggctttttggcggaatctgcggaatatattcgccagaatcatggcgtattgagcggtggtgatttggagtggttgaacgatgaaaccttttttggagttgagaataagcctctcacctacctgctcggtactatgaatatgctgttacaccaaattgaaggagcgcggctagaacaggcaaacactctagaaattcacagttccactgtgccagagaaacaccgttacagcgtcattctggcaaatccaccctatggtggcaagatggcaaaggaactgcaaaccaattttacaattaaatcaggctcaactgaacttctatttttacaacacatcatggcgaatcttgccaaaggtggacgggcaggggtaattgtgccggaaggtgtgctgtttcgaggtggggctgatgctaaagtacgagaaagattgcttactaaatttgacgttcaaacacttctgtcattacctgcgggttgttttaaaccgtacacagatatcaaaacaaatgttattttcttcaatcggcggatggatggaaaaacaactcgcaatgtgtggttctatgacttaaaaaatgatgggtttgaactacaaacaaatcgtcgtcctattgaaggtagccagattcctgatttcttgagtagatgggaagatcgtactgaaagtaaaaattcttggttagtttctatagaagagcttagtaaaaataattgggaactgctgccacgaaatccaaacgccactgaggattatgaacatcgtccagctttagagctattacaagttatcaaaatgcgagaacaacgaattattgagctactaagtgagcttgaggaaacttgggaggtgaattgatggaagaatttacttcaagtccctggactttagctcctgtttcagaaatatgtggagaaaaagaaagtattaatcctgaaaatactccagataaaagctttaaatatgttgatatctcaagcgtgtgcaataagacttttcaaatagttgagccaaagataatcttaggacgtgatgcacctagtagagcaagaaaaaagattcgttacaacgatgtgcttttagcaacaacacgtccatatttaaaagcaattacgaaggtgtcagaagatttcgatgagcaaatttgctcaacaggcttttgtgttctacgtcccacagagaaaattgatccggattggcttttctatttggcaatttctgatgagttcatgcgtcaaattactcctaaaatgcgtgggacaaactatcctgctgtaacggataaagatgtccttgcagcaaaaatccctattccatccatttctgagcagcgaagacttgttattcgtattaaagactgtatggagcaaattgaggaaataatttatctacataaggtaaatattatttcagtttcagatataaagcttagtctagctcttggagagcatagaggtgatcgagattgggttgaagtaggtgaactagtagattggataaaagagactgagacagtcagcgaatcagaaacatacgattttgttggcactaaatcctttggtaaaggtctcttccacagcgcaacccgtacagcccaagactttaaatacccaaacttgcgccgcttaagacatcgagactttatctaccccaaacttatggcttgggaaggtgcatttggtatggttcctaaagaattcgatggttttgtcgtctcccctgaatttgttgtctttcgcaccaaagatggcattgtttgccccgaagtccttgatacttatttccgttcccccatttgcttaaaagatgtcagaaatgccagcaccggatcaaataaacgccgcagacgaataaatccacaggcatttctaaaactaaaaatgcccgtgcctccccatgacgtgcaggagcaactgaaaaaggtttatgagtttgaagccaaagcggcagagagttggaaggatttgccagagacgctggagaaaatccgccagagcattttgaagaaagcgtttgctggagaactttaggcatttaggcgagattacgttattttcctttccctgttcagtatctaagtattagcaattgcatgaattccttagagcagcgagatttaaaaaaagaactgtggggggtgctaaacacctaccgcagaagcggcagaatgcttgatcgtgatgttgtcattcatgctgctgctctgctgtttttgcggtgggcagatttttatgaagcagaacaagcagcgatcgctgaatttgagctatctcactacagttctactctgcgagaaaacatttgttggtctacattgcgccaactagatcctcgcgatctcatgaggattttccagcgcgaacttgttccatctctaaaatatgctgactccacactactcagaaagcaacttcactgcattggtgttgcccttgaacaaaccggaattgagcaatctgaatccctatccgcactagaacctatctttgagctatttcaatggatcgattctttacccttcgactctgccaatgatcgtgctgctgccggaaccatattggaaattttgctctcagacttcatgggaggcaaagacatagggcaattcaccacccctcagcctatcgctgatctaatgatcgaactcgctgacccaaaaccaggcgatcgcatctacgatccctgctttggtatgggtaacttactcattgccagcacccgtcgcctgcaagagcaagctaagtttctgtctccccgcaactggctagaaattcaagaagccagcatttttggcgttgaaattaatcccgtcgcctacgcgatcgggatgactcgtgttgtattagcgggcatcgatcatcccagactggaacttggtgacacactagaacgctcattactccgcaatcgaacttctgaagggtttgacataattctggcaaatccaccctgggggcagaggtcaaactcctacgcttaccgaaatgagttcccgatccacacctcaactacagaaggcctttttctgcaatacatcatggcttcactacgtccaggtggtcgagccgtcatcgcctttcctcaaagcatcttctttcgctcaggtgcagaaaagcagattcgccaacgtttgctgtccgagttctgtgttgagggggttctggcacttcctcctgaagcttttacgccatttgcaggcattcatgctagcctgattgcctttcgacgcgacgagcctgcctcctctgttcgcttctttttagtcgagggttttccctctggtctgcggaaacgagaagcagcactacccgcagaacagcaattatttgccaaacaagttgcccaaactttccgcgaaggcaaacctggaacccacctctggaacactccaattactactcttgaacaaagagactgggaactgcttgtaaagcgaacgggagatgatgcacttgccgaacagttgaagaccctgacggaaactgacccagaaataaaactgcgatcacttgacgaagttgctgatgttttcaccggaatttcttacaagcaggatgtaatcaccaaagatgccaagcaccctgacgttttagctggattattgcgcgtctctgatgtaaaagacataggtgtaaaagccccagaattattcctgactcaagccggagaattgaaggttaaagaaaagtactatttgtctcccttagatattgtcgttacaaagtcaggcacgattggtaaagtcgggttaatttcagatgctcctggaactgtgagggcgatcgccactcaaggtcttgttgtcattagacctaaagaaggtattacagcccagtatctagcagaaatcttacgctccccagcctatcattcctggttgaaagggcactcccgtggagcaacaattcaacacctttcgatagaagcactaaaaaatctcaaggtgcctgttccacccattcaaatgcaaaatcgtctgtggcaagttactcatggacgcatttcagatgccttaagcgcattaatccgaattgtaattggtgccagtgatgatcctgtgttgaactggcttgaacaatctaaaaccattcgagcaataggagaatttactgaggatgtagggagtaaagcaagactattatggtttgatcgctttggcaaagaactttataagcttagaaatcaaggagttcatgaacttgaaacagttcccgcagagataatgccgtggttaataacagctgcaacagccgcagatacccttaatggaatccatgaaattccagatggaacaggtcgtttggcagttttagagaatgcccatcgccggattaaagatgctctggagctattggataacacctctgtcgccgtggtcgagagagcacgggaagtaagtcttaatgttgccaatctcataatccgtgaaattgcatcaaccttagcaaacggtaaccttgatacacgtcttgaaccttccagtattgtggttggtatgacgaatcaagtgacgctcataattaaaaatgttgctgctgtggcgttgagaaatattcatatccacacgtctcccaagatcggcacaggtaaaacagcttacttaagagaagaagaggaatattcaattcccctgcttgtagaaccccaacaggtatcagtaacatttgattttctagtattttggacagctcaacagcttgatggcatcccgattcgtggagaaatcccgctttcgcttgccatccgatcacttcgagaatcatcgactcctgtgaatttaggagctagcccctacgtagtgggtaagccaattgaacaacaagaaatgttttacggacgggatgatgtcattgaacaaattaaagatcatctcaatgatgaaactcagtctaatgtgattttgctagaggggaatcgccggacaggaaaaacttcaattctaaaacagcttcagaaacgtggcataaacaactggctgatggtcgaatgctccttacaaggggcagacagcatggcgacccaccacgtttttcgactttttactagaaaaatttgggaggtttgtaacgcagttgggattttcacttggccacctagccagctatcacccactccagataagcccattcaattacagatggtgaaagctttagatgcgacattttttggagaaaatccatttgaggcatttgaactttacttacaaaccgtcttagaaaagattcagcctcggaaactgctcctaatgttggatgagtttgacaaacttcaggaaggcattgatcagagaattactaatcctcaagttcctgaaaacatacgctatttactacatacttactcagatatgtcggccattattaccggctcacgacgcttgaagcgcttgcgagaagaatactggtcagtgctgttcgggtttggataccagattggcattagtgctttgccactagatgctgcaagaaatctagtaactgagcctgtgaaggggcgattacgatttctacccgaagcccgcgatcgcatcgttagtctgtgcgcctgtcaacctttcttaattcaatcattgtgtactcgtgtatttgagcaggcaaagcgccaagtagaaagaactgttacgcctgccttagttgaatccgcagcagcagcaatggtagaagacaatgaacatttccgcacgctctggaattatgcaaggactgagcgccgacgaatgattatggcaatttgtcagcgtttttctggcggtgatgatccgacaaacctcgattttttagaaatgaagtttgaggaatttagagttagtgtgcctcaaagacgagggctaggagaggatttggattttttaagagaattagaattgattaatttcgattctactcaagggcgcgaggcttatactctctccattccgttaatggagaaatggatcagactccatgttgattttgaagaccttaaacgggaagcaatcagggaagctgaggagatttttgaatgactgagttttatcaagtgctgggggggagtgtaccaaaacttcttggacgggaaacaatattagcaaacttagaaagccatttgctcaaaccaacgcctgatcatgtttcaattattgggtttgctcgttatggaaaaagtgtattacttaatcacttagcagagaaataccgtgccgggaatgaatattttacaactgctttaaacattgatttccgccacacaaaacttacaactgatgacgatttcaggcgctgttttgctaaaggtgttaaatcagctatcgagcaattccgaccagaagttgcagagtatatcgacctgactgacagcaacagcattcatgaactacttgattttgcgtttgcggaattagatagcacaggcgatcgcctacttgcagtcttagacggctttgatcatgttctagcagtttcaaacatgaccagaatgctctgggacaatatgcgaactcttgcactccactccagcttaaccttggttactggtagccgccgtcctctcctagaactatgtgcatctgaagattcacaatcatctgatttttgggaaattttttatgacacacccctagaggtcaataagctcgaagattcagactgggaaggatttctcagaccaatgcaggaaaaaagaattacgatcaattctgctacaaaacgagaaattattgcatggtctgggggaattcccctgcttgcggcagcactgatgcgtgagctttttcgagagactactgaagggtctacactatcggaggctgatgttgggcgtattgccgaaagaatgatcggtggtcagtcccaactcttattggccctctggggtgactgtagcgacgaaatgaggagcgatttagcttcggctgtgcaacaaggaattcctcaaaatcaattgccgcacagcagaaaatctgaattagaaaaacgaggttttctccaagccacgggaggcactctaaaaccagcctgtaagattattgaaaattatactcgtctcagaactccaggagtgaacgatcttcgtcgcttgtttgggagtacgaatgcctttgaagaaaatattttaggcacactggaactgcgatttgcacaaatttccctggttgatccaatccttagtaaccatgtacgcaaagcaattcgagatatctccccatcacctgaaagcactcgcgtttggatgcgaaacattgcagaacggtcacttgacttgatttggcaaaaagaattgcctggtgatcgctcaattcctccgaagtggataaacgaatggaaacaatccggcgactggagagatgatttgttggattcgggcaggcggctttctagaagtcgtggagagcaatgtaacattttacgccttgcaactggtacccaaaaatcctatcctgttgcccagtatgttactaaatccacctacgtcttagtaaatcatcttaagtcagtcggtgactttggacaacatcgagaaatccgagaatttctaaatataggaactgctgtatctttctgcatgagtgcgatcgctctttgcgaaagcctgtacaatgacttgaatcgcccataaatacgaaatttagaagaaatcttgtagttgtgggagatttgtcctcatgcctgctcgtcttatctgtcattatttaattggcccaccaggcagtggtaaatctaccctggctgcccagatgagccagcttattcccaatagccgaattatttcgactgatcaaattcggggaaagctttatggaaatgaagaaatccagggagattgggcagaaatttagcaggttattttaaaagaaattcaagaggcgatcgcacagcagcaacctgttatttatgacgcaacgaatgccaagcgtgtttggcgaatgggcttgcttcagagaatagctgattttgaagcccagtgggttgcctggcatcttaaaactccacgtcaattttgccagaactggaatatgcagcgcgggcggcaagtttatccaacagccttggatgatttattccagagcttaaaacactttccacctttagcaggggagggatttttagcaatttacgagttaaatccagcccagtctaaagatttaatcagtgaagtcaaaagcaaaattaacctccttcctcgtagcatcattaatcgcacaaaccgcactcagcataaccagactgtcttacatccctactctaaattgctagattttgatcgccttttgcatttgattagtttgctgattcgctatcccggtattggtaacttacagactacaaatccagatatcctccagcagataattgtggaagaaatcgagttccaaacagaaatatcggaaatatgtgctattttgcagcgtttgtacggctctatttatgcagatcctcatgctatcaccgcagatatggaatggctggaagcaaataattttctcagccctattactgttaaccaagaattggtaattgctgaagtcgcaactattaatactgcaacccatccatattctgaccgagaagcattcaaaagattattaacaacaatacgttttattcttcaaaatccctttcaatggaattctgatcagggcagcttgagaagcttggtttctgctatgcaaaagcaaggattaattgatgggaaccagagggaggcaatccgcaaagatattgaacgtatactcaagccgtttcagcttttaccagaatttgccttaaaacgtggctactttattggaacaggcattttatcagcatcccaactaactaaggtttttcatgttctgcaagcccacgctaaaaatttacaagacccgatcgccttgagaattttggaaatatttgacgaacggatgaggcaaagccaattaagtactcaagctatctaccctatccgagcaatctgcaatcggacaattattgacccgcaactgctgcctcaatctgcccttgctagagaaatcgagaaactggaagacgaaattgaacgtgggcaactcttagaattaaaacatttttccggtgttggtcgttacgcagacgatccagaagaattcttccgcatctggcccctgcaaattgtgtttcataacattggttggtatctcggctttgaaatcgctgaaggacaaaaccaaggactattacaatttgaacgcttagatcgtttatttcgaggctatcctcaatcaaataagcgcgattgcagtcggcaggataagtctctcaaaaagctccagtatctttaccaagcttgtgggggactttacctcggtaaaagcgtagccgatcaacgtcaatttttgagcaaatccctaagcaatagggatgcagtctgtataactgtagaactttggtttaatgactacacgtttcgattcatcagcgaaggaacccaacgatttcctatcacacaaatgaagatgtctccacggctctctggcagtcaaattccccagggacaggcttacctttttagcctatctaaaagcccagatcctactcatataaaccgatttcgagtaaagttaccctgctggtcactagacgacatcgatctccgtcgctggattttaggctttggggatcaggtgaaagttattgaaccgcaagagttagcccaacaaattcaggggattggcgtggcgatcgcaaatctctacagctaaccgaagtttgggttttgtctttaggacagtacccattgccaataaagattggatttacagccaagaattcaacagacaatgtacaaagattagaatttgtaatcaaaaatttatcagcttagttaaataatccgtcactctagtaattaaagagcgtgctgccagaactgagccagatccacctttttgtcgtggttggattggggtttaggacgttgcataacttctacaactttaattccagactaaaatttccgaacaatattttgcctaattccttaaaatctgacccaaacaactgggatacgctaatcttcgccttatcgcacacaggaataatcaacttcaccaaatgataaggttgactttgatttgttgttgaggctatcctcaacgattccatgattcctcctaaatatcccaataacttcacatccttttcaattgcttgttcaaacactaacaaaatcaattgtaattttcgggttaactcgattgggatgggtttataacctaattggggagtaagtgcaattaattcgctaattccttgaatattaactcgatatttctctatttcttcttcgcctttaatttcctgtcctaaccacccgtaacaacgagaacaaaatcccgcaggtgaaaacctagccatcacaggtaaacgggcaccacaatgaggacattcttctattaatcgctgtttgtgaatcaaacaaagttctacatccttaaatgaccatgataatggttcatagatagttttgttatcctgcatccactcttcccaacaacaaggacaccaagcgcgatagttccgaaataatcccttgtcataaatcattcctttccagcttaaaagggtcaaaaagcgtaaatcctgacgcattgttaactcttctaagacggtgactaacttttctgtcatttctcgcattccgttaatagccgatttagcgtcgctatttcccaataggtgactcaggttttttgacaatagctcagatttatcctcatctttgagaataagtggcgcaatttctcccataacgagcttctgagaggttaaacaatgcgcctgcgctaaacgatggagatagctactaagactttctgtatagggagttcccagcgccacaggttcaagagaaaataaccgactccgttgcgggatttctagaggttttaggctccaatgttctgagtaaatagtcatccctcttggattaacctaaacgctggtactttacttttaaaagctaaatttcaggaattagtttccgattcactcttaacctcgatgccgtaattaacaaagagatcggagacagatatctccaaagctgccgctaacttaacaatattttttaacgaagggttacgctctccggtttcaattcctgaaatgtagttgcgatgaagccctgacttttcagccagttcttcttgggataaatctagctctcgccttcgccgcctaatcgctttgccaaagcggtactcaatactggagtgtttctgcgtcacaaaacaatactgaaccagtatcaccattaaatccatctactataagtggacttttgcacaatataagtgttataaagttaagtagtatagcatcaggcaagcaagttcctaactttatggtcttattttgatagattcataaaataaagcgcaaagcgcttactaaggagtatatgaaagagcaatttgaacaatgggttgctcgccttcaaatatccgaggcagggcaaaaaattattgagaaagttcgctcatctgagccatcccgtcgcgttggtggcggtagcaagaatgtttcgggacgctaccctagccgcaagatgggagtcacgattcaatttgagtctcatcgggttgaactgccaattgtttatcagttagaacacgatgaagatgttctagaattctacgatcaaccaccgcaaattaaacttgactatcaagcaagtaatggacgtagattaggcgttttacacaccccagatttctttgtcatcagaaccaattcggctggttgggaagagtgtaaaactgagcaggatttgaaaaaactagcagagaaaaaccccaatcgttacttttactctgaagaagatactcaatggcattgcccgccaggagaactctatgctaaccagtttgggctttattaccgcattcattcagatcgcgaaatcaattgggttctgcaacgtaatctgcaatttttagaagattattgccgagccaaattcctagcagtggaagaagcgatagctcaatcattacttgcaattgtgtcatctcaaccaggaataactttagcagaattactcaatcggtcaacaggagttaaatctgacgatatctacaccttaattactcaagagcaaatctatattgatttaaatgcttcaccacttgctgaaccagaaagatgtctaatcttccgtgacgaacaaactgctagtgcttatagattaatggttgagcaaccaagcgtaagtcttccggctatctctcctgtagtcaatattgttaccggaacgcttgttaattgggacggcaaaggtttaaatatcatccatgttggagaaacagaggttatacttggcgcagaaaataatcagttaattgaacttaaaaaagctatatttgagaatctggttcgccaaggaaaaatcacaagtctccaaacaccagaaaaaacagctattagcacagaatcttggcagcgattttatcaagctagtcctgaagaccaagcagaagctcttgaacgctacagaactatcgaaccttacttaaacggccatcccccagaaaacgaaacaataccagcccgtaccattcgtgactggaaagctaaatatctaactgcaattcaaaaatacggttgcggctacattgggcttttgtcccatcgcagtgtcaaaggtaatcgtcagcgcaagctgcccgaagacaccttagcaattatggagaagtttattttagaagactatgaaactcttaaacaaaaaagaatgtgggaggttcacgcggctttagttcgagcttgcgaagaatctggtgtaattgctccgagctataaagcatttaccaaagaagtacaacgccggactggttacgaacagactaaaaaacgccaaggtcgtcgtgccgcttatcagcatgaatccttctattgggagcttgctataactaccccaaggcacggcgatcgcccttttgaaattgggcatatagatcatactgagttagatgtagagctagtttgctctgatacaggtcgcaatcttggcagaccttgggcaacatttctcgtagatgcttattcacggcgattgctggcagtttacctaacgtttgactcaccctcatatcgttcttgcttaatggtgctaagaatttgtgtcaagcgtcacggcaggcttccccaaattgtagtggtagataacggtgcagagtttcacagcgtttattttgaaacactactagctacttttgaatgtacaaaaaagcaaagacccccagccaaagctcgttttggttcggtttgcgaacgcctatttggaacttccaatactcaatttgtccataacttgctcggtaatacacaaataactcgtaacgtccgccaagtcaccaagtcagttaaccctaaaaatctagctgtatggacacttggtttactttatgaatatctttgtgcttgggcttacgaagtttacgatacagacgaacatccggcacttttccagagtccgagggatgcgtttgctgcgggtatggcgattggaggcagtcgggttcaccgcatgatttcttacgatgaaaactttcagattcttaccctacctacaacctcagaggggaaagcaaaagttcaagttggacgtggtgtaaaaattaactcaatctactactggtctaatagtttccgcgacccccaaattgaaaatacctctgtgcagataagatacgacccgtttaatattggtatcgcttacgcctttgttcgaggacagtgggtacagtgtatctctcaatattatgcagaactccaaggtcgttcagaaaaagaattgaagttagctagtatcgaattacgcaaacgctcttcaaatcatgcacaacaatctaaagtttcagctaagaatttagcagaatttttagcatcggtagaagctcaagaagctctattagaacagcgttcctatgatgcagaagttaaggaagtctttagggtaatcgagggtggaaaagcgacaacaagccgtaacgaagaaccaaaacttattcaagttacttttgccaataccgattttcaagcggatgaagatgaagcgatcgtcccagaaacacttgtagtgtatgaggagttttaactatgacaaaatctactggatttcctcttgaactcctcacacggactgctaccgaaaggcttgcttactttgaaaattacaccgtagcgcatcctcgacttaaagaagtctatgaaattctcatgcgaacgattgctgaaccagcaggagcttcatttatctttgtttacggtgctagtggtgttggtaaaacaactttgcgactccgcgttgagcagaaattaacagaactagcattacctaaactggaaagcgatcgcagtcgtgttcctgttgttggtgttgaagctgtagccccagaatcgagaaacttcaactggaaagattactacacacgcgccttaatcgccttagaagaacccttaatcgatcacaagtttgattacggcgtgcgtggcatctcccgcgataatttcggaaaaattaattttgagtcgaaagtagttgctcctgctctacgcagagctttagaaaatgctctcatccatcgtcatccagacgtattttttgtagatgaagcacaacattttggcaagatggcaagcggatacaagctacaagatcaattagactgcctcaaatctgtggcaaatatgacaggtatcttgcattgtctattaggaacatacgaattactgacattccgtaatttaagcggtcaactctcacgccgtagcgtcgatattcatttccgccgttattgtgctgacaactcagaagacgtacaggcttttaaaagtgtattgttgacttttcaacagcagatgccactttcagagtatccagatttagttactcattgggaatatttttatgaacgtacattaggatgtgttggcatactgaaaaattggctaacacgcgctcttaaagatgctctagatcgagatgcaacaacagtcactctcaaagacttacaaaaacgtgcttggtcggttgctcagtgtcagagaatgttcaaggaaattcaagagggcgaacgacaattatctgaaacggaaacagacgtacaaaacttacgctctgctctaggacttggagcaaagacaattgcacagccagaagaagctccaaaaaacactcgtccaccaggaaaagttggcaaacgcaatcccaaaagagatcctattggagtgcaacaagatgttagctaatcgattagtaacatacgaatgttgggatttaaaaaagctttctattccatctcgtagtcggttgtatcaattagagcctgttggcattagaacaccaatggtggaaagccttacaggatacatagaaagattagcagaggctcattgtgtaactccagatgtattaatttcacgaacaattacaccactgctaaaacaaatatttttgaaatcccgatctagtagagatttacgttctcttttcgaccgtgctacagctataaatggtacaggaaatatagtaatagatttagtacaagcacttcagaagctaacgcttatagaagatttgcacttgctgaccctgctattttggtctgaaattattcccacgcgcaatttgtttcgtaccaaaagcgcttggtgtactgtatgttacgaagaatggcgtttagctaaacaagtaatttataaaccactactttggactataaattcagtaaaagtatgtcctttacacaaaatatatctatgtttgcaatgtcctcactgtcagcaggagttgccactactaagttggcgatcgcgacctggctactgttccaagtgtggtgattggctaggtatgaatcttcctgtcaa

SEQ ID NO: 861 - DNA, 32767 bp, Tolypothrix sp.; identical to SEQ ID NO: 713
  source 1..32767: mol_type = other DNA; note = PCC 7910

SEQ ID NO: 862 - DNA, 152 bp, Anabaena sp.; identical to SEQ ID NO: 144
  source 1..152: mol_type = other DNA

SEQ ID NO: 863 - DNA, 295 bp, Anabaena sp.
  source 1..295: mol_type = other DNA
tgtagacaaagaattcggttaaacaattattacagttcgaatatttaatctgccgttgtcgataaaataaaacgattgaacaatttcagcttaacctctatggtaaacttgatttttagtaaaaatctcaaataaaacggttaaacaattgtttgaatccattactgataaaggttttgagtaattccataagttcaaaattatttgagaaagttctgctgtgcgacaaagatgcgatcgcaattcatcttgcaatcaagaatctattcgtgattacaaaacgtaaatatcccgg

SEQ ID NO: 864 - DNA, 35 bp, Anabaena sp.
  source 1..35: mol_type = other DNA
gtgctttaacattagatgtcgttaggcgttgagca

SEQ ID NO: 865 - DNA, 108 bp, Anabaena sp.
  source 1..108: mol_type = other DNA
tgtacaacaataaaaaagtcgtataacaaataaaaaagttgtacaatatataaaaaagttgtacaatatatcctgtgggtgcatatgcaagcatctacaggagttttt

SEQ ID NO: 866 - DNA, 198 bp, Anabaena sp.
  source 1..198: mol_type = other DNA
tgtaaaaacataaaaaacttatataatttgaaagtttataagccttgtatttacgttcaattttatttgatatcaaaaaataaagttgtacaatttttcagaaatgcctcatattgataaataaaaaagtcatataatttgccgaaagcaagccctgtaaggatttggcatctatttgttccaaaataacttgcgatc

SEQ ID NO: 867 - DNA, 36 bp, Anabaena sp.
  source 1..36: mol_type = other DNA
gtgctttaacattagatgtcgttaggcgttgagcag

SEQ ID NO: 868 - DNA, 112 bp, Nostoc sp.
  source 1..112: mol_type = other DNA
tgtggaaacataataaagttgtacaataaataataaagttgtacaatgcctaataaagttatacaatttctcctatgggtgagtataattccatctgtaggagattgtcttt

SEQ ID NO: 869 - DNA, 199 bp, Nostoc sp.
  source 1..199: mol_type = other DNA
tgtataaatataataaagttgtataatttgcgcggctacaaggattgttatatcgttgattactaagaagtcttgaaaaaataaagttctacaatttcatcaggctactatccaaaaagaaataaaaaagttgtacaattttgcaaattacttccccgtaaggatttgggaatatttactccaagatttagtggcgatc

SEQ ID NO: 870 - DNA, 36 bp, Nostoc sp.
  source 1..36: mol_type = other DNA
gtgcttcaacattagatgccattaggcgttgagcag

SEQ ID NO: 871 - DNA, 216 bp, Nostoc sp.
  source 1..216: mol_type = other DNA
tgtgactttacccataactttgccgttactggaaccataactttgccgtcaacaacactacaaccctcattcttgcgtcagctaattttggatgaaattgacagtttggaaccataactttgccgctagtccaaattggaaggataagcttgccgtgagtccaatcaagcatagaaagcaggaaaacgccgaatttttttagaatggagcagaagc

SEQ ID NO: 872 - DNA, 132 bp, Nostoc sp.
  source 1..132: mol_type = other DNA
tgtgactttacccataactttgccgcaacggcaagcttatgcttccaataaagggtggcaaggttatggttccagttatataagctgttctagttttacatataacagcttacaaaccaaactcacgtcgtg

SEQ ID NO: 873 - DNA, 36 bp, Nostoc sp.
  source 1..36: mol_type = other DNA
gtgagtcgtggctttatgccgttaggcgttgctcaa

SEQ ID NO: 874 - DNA, 169 bp, unidentified
  misc_feature 1..169: note = Synthetic
  source 1..169: mol_type = other DNA
tgtgactttacccataactttgccgctactggaaccataactttgccgtcaacaacactataaccctcattctcgcgtcacctaattttggatgaaactgacagtttggaaccataagtttgccgttagtccaaattggaaggataagcttgccgtaagtccaatcaag

SEQ ID NO: 875 - DNA, 131 bp, unidentified
  misc_feature 1..131: note = Synthetic
  source 1..131: mol_type = other DNA
tgtgactttacccataactttgccgcaacggcaagcttatggttccaatagggggcggcaaagttatgcttccaattttccaggtgtagagaaagaagccaacttactctgcccttttaagtttaatagct

SEQ ID NO: 876 - DNA, 36 bp, unidentified
  misc_feature 1..36: note = Synthetic
  source 1..36: mol_type = other DNA
gtgattcgtggctttatgccgttaggcgttgctcaa

SEQ ID NO: 877 - DNA, 215 bp, Tolypothrix sp.
  source 1..215: mol_type = other DNA; note = PCC 7910
tgcgacttcacccataagcttgccgctactggaaccataactttgccgtcaacaacactaaaactctcattcttgcgtcagctaattttggatgtaattaacagtttggaaccataaatttgccgccagtccaaattggaaggataagcttgccgtgagtccaagcaagcatagaaagcaggaaagcgcgggattttttgagaatggagcaaaag

SEQ ID NO: 878 - DNA, 131 bp, Tolypothrix sp.
  source 1..131: mol_type = other DNA; note = PCC 7910
tgtgactttacccataactttgccgcaacggcaagcttatggttccaatagagggcggcaaagttatgcttccaattttccatatgtagagaaagaagctaactaagtctaccctttttaagtttatagct

SEQ ID NO: 879 - DNA, 36 bp, Tolypothrix sp.
  source 1..36: mol_type = other DNA; note = PCC 7910
gtgattcgtggcttgatgccgttaggcgttgctcaa

SEQ ID NO: 880 - DNA, 31867 bp, unidentified
  misc_feature 1..31867: note = Synthetic
  source 1..31867: mol_type = other DNA
aaaaatacaaataattcagtaatatgtataacaataataaagtcgtataacaaataaaaaagttatacaatacataaaaaagttatacactttatcctgtaggcgcgtatgtgagcatctacaggagtttttatggctagaagcaagcaagattggacgcaagccaagtttgagcgttatttgaaggaaggccgtggtcagggtagtgggaaaggctatcaaccttggataaagattcaggattttccttcaaagggtcgtgtttccagacccccaggttggaaaacaaaccgagaacatcatctgctttctgataacgagaagcggctgttttacgtcttcgagtggtcagatacgattgtagatataagagagcagtttcctttaattgaccttgacttagcaatgagtattgcagaggaaataggtattaactatcccaaagatccggaaagcaatactgcccgtgttttaacaacggattttatgctttctgtcaagcaaggcaaaaagatagttcagaaagcacgaacatttaagttaactaaagatttgggaagtaagtctgtagctgaaaaatttgagttggaaaagcgttattatgctgccaaaggtattgattggggaataattacggagaaagaagtccctaagcaattagcggaaaatgttgagtgggttcatactgcttataaactagaagaaaatgcagatataaatcttgaagaactgcgtgacattgccaacattttaaaatccagacttcaggaaagtgatgcaaacattaatcgaataacaacagatttagataaaaatatgaatatagagtctggtacatctctgtatctttttaggcatcttattgctaagaaggaaatcattatggatatgttagccacaaaaatatctagttgtccttcttctggagcaattaaaaaaattattctttagacaataaacaataatatgtagtgcattaaattatatgagtaatgatttatttgtcaatgatctgattgaatggattgatgaatcaggtaatagctttatagaacgagttctctggattgatgaaggctatattatagcctttgtttttaatataaatactaaaacaggatttccagaacccaaaaaagtttcggagattgtagaagctatttctaatggtagcgcattgaaacttaaatcagatccgtgggcaagaatagtaacagaggaagatttgtctgagaaagaaaaagaacttagagatagagcttgggaaataatttcatttattgttattcaagaaccctcgatatattatcgggattatagaggtgctttagttcagcagactattgaaaaatataatacaggtagaagtaaaggtaaattagtagaaataagtgtttataaatatttaagaagattttggcaaagaggtaaaaataaaaatgctcttttgcctgattatgtaaattctggcggtaaaggaaagcctaaagcatctggagaaaaaaagagaggaagaccaagaaagtatgtacacgatcaagaaattggtattggaataaatgtcactgaggaagatagaaaaatatttagatttgcaattgctaagttttacaataactctaaagaaaattttttaacaaccgcctatgatttaatgattaaagaatattactcagaagatttttattacgatgaaaatggagtcaaaaaaagtattttgattcctccagacaaacgacctacatttactcaatttaaatactggtatgaagtagaacaatcggatattagaaagactatcatatctcgtaagggttcgataaaatacgctttagaacatcgagccattacgggaacttcccaaatggaaactattgggcctggatctagatatcagattgatgccacaattgctgatgtatatttaatatcaatgtacaatcggaattggattattggtagacctgttatctatgtgattattgatgtttttagccgtatgataacgggagtttatgttggattagaagggccatcttgggcaggggcaatgatggctttagccaattcagccacagataaagtaaaattttgccaagaatatggtgtagagatttctggagatgagtggccatgcagacatattcctgataccattttgggcgaccgtggcgaattagtaggaatgaaggtagaaacattaatccctaatttagatgttcgcattgaaaatgctgctccttatcgagcagattggaaaggattagttgaaagacaatttcggactattcatgggtatgtaaaaccatttgttcctggttatatagatactgactttagacagagaggaggtcatgattatcgcctcgatggtaggcttaacatagatgaatttactaaaatagttatctttttgattctccagcacaacaatcatgattatttaactaaatatgctagagatgaaatgatgatcactgatgatgttaatcctatacctagagagttatggcaatgggggattgccaatcgttctggtagactgagaacttttccagaagatattgtcaagctgaatttaatgccagctgaaaaagcaacaattaccgctcgtggtattaaatttaagggaatgtattatacttgcgagaaagcaaggaaagaattttggtttgaaaaatctagaagtagtttactttccaaatccgaaaaatcattggatatatcatatgatatccgacaatcaaagtacatttatttgcgctctccaaatggtagagactttgagaagtgttttcttttagagtctgaacaaagatatttagataaaaatttatatgatattgaatatttatttgcatacgaagaattgcaaaggcaaaaacaccaaggtaaacggctacaagaaaaagtcgatttgatagccaatatagaaagtatagttagtaaggctaaagaagatactgaagcggttttagacgataatacaagtaatagacaaaaggttgcaggaattcgagaaaatagagcctttgaaaaagatagacgacgtaaaaatgaaggttttgaactagcaaaagaagaaattactaatagtaccgaggctacgaataataaagtaaacactcaatctgaagatttagagtcatccaaattattgaagcctgaccatatggatttactcagacgaaaaagacaggagcgaaaacgtggagaagattgagggcgaacttgttatgattcctaatggaaaatcagcgattgttgccagatatatagaccaaaaacttccagaatacaacaccaatccattgattcaggcactacctcctatcctttcatcggaagaatttatagataaagtaacgagaacaccagactttgatgagcaagaaaggcagctagaagcgcattatagatttcattgcattgagaggctatctcgatattttgatcctcaaaataaaactgttgaattacagaaagttattaatgtattaattatgacgggctatttagctcgtaatattctgacacccgattatgcaaatcgctctagacagatttataatgctataaaagatggaggaggtaaaaacttacaaagttatgttaatctccctacatctgcttctggtctaactctaattggcccatcagggatgggaaagtctacaaatttacacaatattcttaatctttatcctcaagtaattcttcatcctaactatagtgtttaccaaatagtttggttaaaggtagattgccctaaaaccttgaagggtttatgtacagatattttcatgaccatcgatcaattattgggaactacattattcaataagtttaactcatcacgtagctccgaagattatctacttgctcaacttgcacaaatagcacatactcatcatttaggtgttgtagtgattgatgaaatacaaaatttggtaacgactagaagaagtagagatgaaattttaaattttttagtcaaacttgacaatattattggaattccagtaattcgtgtgggtacaaatgaagccattagtattcttcaaggtaatttcagaaatgctaggagaaataccggagaaggaagtgtaatctgggacagaatgataaatgatgatgaatggtgtttctttttagaaggaatgtgggaatacaaatggacaaaaaccccggtttttttgtctgatgaaataaaagaagttttttatgaggaaagtcagggaattattgatattgctgtcaaactttacaagatgcttcaatggagagcgatttcaattggcggcaaagaaattattactactgagctacttcgtaaagttgctaaagatggattatatttagttaagccaatgctggatgcaattaggtcaggagacaaggaatggatgattaagtataaagatattgctcctctcgatactacagaatatcaaaataaatgtcgatctgagcttgaatctaaagatttgcaagagattcggagattagctagaaagcaacagacttatcagaaagtatcaccgaagctaaattatgtaattcttgagcttttgaagttggaagtagaacctgctaaagcaaaggaatgtgctgaacaagtaatagtttctagtgatgaagatgcagacattacattgttaacaaagaaagcatatactcttgctttgcaaggaggacaagtaaatgagagtcttgttaaggcaaatataagcaaggctaaattaaaaccaaagtaccaaggaaatgacattcgaggaattgttgaaaatgccaagaaggagaaaaaatttgcatacgatgatttgaaattagctggtataatcaaaaatccagtcgaagattttataaatatttagcttcttgatgcttagttttttcccaactctgtatcctgacgagcttttgtatagtagtttagctcgataccatattcggagtggtaataaaagtttcaaacaaactgacttagagctattcggttacagttctcaacaagtatgcaaagttactttaactaataacgtaaattacttagttaaaaacttccctttacgttctcagcagacagttgataatttactgcaaaatcatactttatatcctttttacgcaactttcttaatgccacaggaagcttggttgttaaaagactcaatgagtaaaaaacttagtgggtctattttagagattgctaaggtggctactggttctagtggcgagtcaaaaaattttttaaaattttgtcctggatgtttagaaaaggatactcagcaatatggtgagccttactggcatagaacacatcaagtaccaggaattttagtttgtccaactcatggtgtcgttctttgggatagttgcgtagcacttgagtcaaaaggcatacattattatgctgcgagcgtatataattgtttagtaattacagatgtcaaaagttttacaaatcaggctttaagaacgctcttaacactgacaagtgatattaatttgctaattcatagtaattttacttttaaaggtttggcttggcttcgcactcagtatcaacgttacttagttaataaaggactgctgcaaatttttcctggtggaaagcttaagtttgatgagtatgctttttcaaagcttatatttgatttttatggtcaagaatccttagaagcccttaatccaaagttgacccaacatcaaggtaaatatttttctcattgcttgcttggatgtgacttaaatccagcagttgaccgtatcactcatatcttaatggtaaaatttttagcaaattctatagaagcattttttcaggaataagatttacatcaaaagattgttaccaaaattaatataaagcaataataacttactaaaaagtattatattcgcttgccgttttaaagtactctcacattaattactaaggtagtctaaataataattagttgcctctatcgtatatctgcttaaagatagggtggtaaagatggttgttgattgcagcttacctacacagattctctcagagtcacccttaaatctaacaaagccaacggaggttttaacacctcacttaccatacatagatttaatttttaacctgattggtgaaacagtacctctcgatcacggctatgagttattttctgcgatcgcccactttgaacctgaacttcataagttaaatacagttggaattaatactattgcaggtattcccaaggaaggcgtaattcagctaactaaaaattctaggcttcggattcggctaccagtagatcaagtgcgtttggtttatccgttagcaggtaagtccctgaaaattggcaagcatacaattcgcttggggattcctgaaatttatttgcttgagcctgcggagagactgcgatcgcgtatagtaattatccagagctatcaagaaccggagtcatttttagcagcagcacagcgtcagttagaaaaactgggtatccagggaaaagcctttattaccaaaaatactgatggtagcccaaaacgtagaagtatcaaaatcaagcgctttacggttgtgggttttgggttagaaattattaatctcagcgatgaagattcgctgacattgctgagatatggcattgggggaaaacgtaagatgggctgtggcgtttttgtgcctgtgaagagaaagggaaacgcaagttaaagctggttttgactactaccccaatataggtttgagagtatttcccagaaataaacaagatgtccgtagtagctagtgttgtcaaccccaaaattcagttaaatttgggcgatccaagcataacttggatacatcgtgctggcatagcaggactctggatgacgctcaagcaactagaaaaactatacccaatacctgcggaacgacctggtaatttaacttggttcctgactcatcgcagtatcagcctggaatggcaagggcaggatttcgtagttttagactggctgctaaagcaatcttttcagattaatgaagaaggtctaatttcgctgacaggcttaaatacgcattcaatcaatattgaaacccgaattaatattcacttgggaataacaggaacgtttctccaacataaccaggtttttaaatttgacggcggtaaatcctggtcattaatagttgatggtatagaaatcgatgtcgagtataagaaagcagtttcctatgctcatcaacattttgctaaacaactctgtgataaacaaggtcaattattaggacaatcaattggtgtagcagggtggctatatccgggatctgtagttcgtcatgtcgcttttacaaaagaaactaggtttgaagagaaaccacaattggcttttgctcttttatatgctcctgttgcttgccactactttgttttgcgatcgcatactaaaccggaacatacacaatatgccctagttatacctgaagtggttgacttagaaatttatgcccaggaatactggaatttggaaaacttagattacaaagattttaatgtatctagcttaggagatgctgcattaagataccttacttacgaaacaattatagaattggctatacccgatcaagtaaaacgatgccaagtaatattatttggaacggtagtttggtcaaagcagcaaaaaactcgcatagaaatagcagtggtagaagcgactggaataataaattttatctataagcttagtgggatttcttttccagagtaccaaattattcagtataaaaataaaaattttatcattagcaatctgtttaggggaacaattgccgataacttagtaaagggctttccttggtgggctaatttatatacaatctttaaaaataaaagtttatttaaatttattactaatgatggagcttataagatgattcaaaactctgaatggaatctagaaagtcaaaaactctttattaaagcttgtcatgaggcattaaagaaaatatacgctaaaatttatggacgaacaaatgaaggtcaatatgctcaaattgagcgagaaaatatacgtattttatcgcaactaggacgttgtacaaatgctgaaaattttcggaaatttattgcagagttttggggaagagcaggtcaactttccattctagaaaaacactgggaagaattactgccattaacttctggcataatggattggaaagttgccagagatttaacttttattgctcttgctagttatccaaaaagcaatatggttgagaaacaaatattggaaatccctgattctaatagtgaataattacacatttttttgcttaaaaaacacaaaacaatgaatttaataggcaattttaaatgtttcatttattcggtaatattttgactagctatggaaccgcagctaataatcgtggggaaaatgaaggtaatataactcctttacaaaaattgaattggaaaggtgaagttcatactcttgtttcatctgaggcgattcgttgggcattacggtactactggcaaaatgttggctatccggtgaatcgacgttgggatgagaatgctcaaccagtagcggatcatgtttggcaagaccccaactttgatgatattcgcttcattgatgatgatgttttgggatttatgcaggcagaggcagcaaaagctgaagcgtccgatgagtctgaaggcgaggccgaggaagcatctcaaaatgagaacaaaaaaatttctaaaggtaaggataaacaaacttctccacgtaagggcaagcaaaagcctaaaggaaaaataactgctagacgaggtgtattagaagttactcgtgcagtatcaatgataccctttacgggagacattacctttaatgctgttagtggagtaaaaggacgaaattctctttatgccacagagattcatgctactcgttatcaatatggttttgcattgacacctgatagcctcaaagataaatctcgcatccatgctgttctagatggtttgatttcgattggtgaagtagcgggaaatcatgcccgttttttgtatgatttctcccctgaaagtatagtactgcggtggacagatgatttttcccctcgttttctatattgctttgagcaagacgaactgggcaatttgtcagtatcaaacttagtgcgacaggtagaggtaggagatattgatcccaaagaattatggattggaggcttaatttctcagggtttagaagatttgggagcaaatgtgtttcctggagtgaagtcggcagtcaaagcactaaaacaggtcattgctgaagatttgcagttgtcatcggggagcgattaacatgatgacaattgctttgaaagttgaagtacctattgcttgctttcgtcaatcccgtgctagagaatacgctgaaacgtatccagtgccaccgccttctacggtgtacggaatgttactttctctgattggtgagacagatcgttataagcattgtggaactcaattagcgatcgcactcttgtccaaaccagaaaaatctattgtaattcggacttttcgcaggtttaaaacgaaagatatccaccaccctaagaatgctaaacctgattaccaagagttgctaacgaacattgagtttgtagtttgggtaaaaacagacaaagcaaagcctactttaccagaacttttgcagcaagcatttgcgaacccagcttctatcaatcgatttggtgggctgtgtttaggtgaaagtcgggatctagtcaatactgttacccttttacctgagaactatcatggtgagtctttgtggtggttagttacagatgaagatggttcgctaaccttaccctactgggttgaccatgttgggtctaagagaacacgctggcagtgttatgagcttcaagagtcccaagtatggcaaccaccggatttatcgtggactacaattcaaactagttgaaaaaggaggatatttagattttgacaaggatatctgcttgttgagccgacataaagagataaaaagtcggtattctttactgaatcagcaattcagcgttttcattatgattaaggatgcttgcaattcctcagaaagttccaacaataagccttctggacgttgctaaactaacctagcctattaaattttgcaaatttagtacctcctaatggcaggtgcttgtaagattatctagaagacctgatggattaatatgtttagccatcgccgttctttaacattggatgtcgtcagacgttgagcagtcgaatacttcgatggagcggaggagctatcagcgcttctttaacattggatgtcggcagacgttgagcagagattgcgttcaccatcaaagaacaagccaattggagttctttaacattagatgtcgtcagacgttgagcaggttggtgttccagcgattgactataccgagatgcaagttctttaacattagatgtcgtcagacgttgagcagactcaagctcaagcaagtaggttatgggcgatagtagttgtttaacattggatgtcgtcagacgttaagcaagattctgctgcttattgccataatttatgcttcaaaaagctccctcaaccctcttgatgggaaatttttgtgcggatttgttcccattgctcaatctgcttctgtagttgcaatttgcgatcgccctcaactgcaccaagaccagtaaacaaaccctgaccgttcaactgatcgctgtaaatagcaatcaattcagtcagtgcttttttatagctcccatctcctcctcagtgaaggaatttacatctaggtaaatcagttgtctgccaattctctctacaagctccgacctgcttatatcaaaattggaagcgatcgcatctaatccttcaataccagtgggagtaagggctaggttgacccttttcttcacctcgtcgtacatctctggtacgtctttttgtcctttctgccctttctttcccattagtacccagctattacacacctcctaaatcatagtcaacagcaaggactacggatagattctataaattgctcaaagatatttagttattgtgtaatacctgaattattgataatataggcgttgtgtaatacctaagtttttgatgataaaggacaaaaatcctcataattttgtttgctgtgcagagaaaggtgtggaaggcgatcgccacaaacttgaaacactttggaatttacaaaaatatttttttcagggttaaacatgagaaagaatctatgcttggctttttcccagccccttatccagatgaaattttatacagtatcttggctcgttaccacattaggagtggtaacacaagtccaaaaataactctaagagagctatttaattctcaagatgtaatagctactgttgacttaccttctaaccttaattcgttgattgagaatctacaatttatctcgaattatcaagtagaagatttgatatataaatataccctctatcctttctacagtatttttttgccgcagaaaagagccagtcaggtgatggactctatgaaagcagatttcggaggagatattcataccagaaccggaattatggcgagttcgttgaagatgcagaggtatctgcaattttgcccaaaatgtttggaagaagatttgcaaaactatggggagtcctactggcatagactacatcaaacaccaggggttctggtttgcccacttcatggtgtgactttgcaagatagtacaatttttatgcaaggttttaacaggcatgaatactatgctacaagcctagaaaactgtcctgttgtaccgatacaacagacttacagtcaagagactttaaaaaagttgctactgctggctcaagatatttcctggttgataactaataatcttttctctagagaactagagtggtttcaaaaaaaatatatagctttattgattgaaaaagattttgcaacggcaaccgggcgagtaaaccagaagagactactagataatttcttgttcttttatggtgctgaagtgcttgaggctgttaactcaatggtgaattacgaaaatgagcaaaactggctattcagcattgttaggaagcatagaaagtcatttcatcccatcagacatctactcgtaattagatttttgacgaattctatcgaagaatttttcaacacggattatcagtataaaccttttggtgaggggtcttggctgtgtctaaatgctgcggtagaccactacctcaagccagtgataactaatcttgttgtcactcactgtttggataataaaaagccgttaggtactttttcttgttcctgtgggatggtttattgcagaactggccctgatgaaactgatgaagataagcagcgaattggcaaagtcttgacatacggtcaattctgggagcagaagctaaaagaactggtagaaatccaaaagttaggtctacgagagacagcaagacaactcaaggtcgattccagaacagtaaaacgttatactgccatacttaagctaaaaactttttggaaatcttcagagaaaaatctgctagtagactcacaggaagttttaaacttaaatctaaatttagccagtgatgacagaatcaaatacagggaactttggaaagctttacaacagcagtacccagaagcctcaaaaactactttgaggggattagccaagggaacgtatatttggctatacagaaacgacaaagagtggctcaacaaaaattcgccttctttaaaagtgcctctcccttgtgtcgggaaagttgactgggcagaaagggacaagcaagttctcgaaaaggtaaaaactgctgtgcgaacatttctgagtgcagaaaaacccgcgagagtcactatttgcaggatagggaaaagtattggcttactagcactactcgaaaaacatttggcagaaatgccactgactaaggtttatttagaatcggtcacagaaactgtagaggattttcagattcggcgtattaagtgggcaattaagcagcttgatgattgcggagaagaaattcagccttggaaggtgattagactggctgcgctacgagaaaattgctcacagagagtacaagcggctctagaaaatgagctttataagcaaccgaattaagttaataacactttctagatcatagttctgttgatcaaaagcttcaaacaagaaagagacgtgttaaatccacgtctctaagtgatgacaaaaatattgagttctaagctacatctgcaactagcaacccgttaacagcaataatcaaaagcagcgctgaatcagaagtgtcacagcaatgtcttttatcgctattacagggttgcactatccatttgccttcaagattctggtaaaaagttcccagaagttgggaaccgttccaaactcgatacagttctcccaaatcatctggcactgagtcaatttcaatttctggtgccactgcgtcagctaagtggtcaacatattcctcaaactcaaactctgcttgagccgaggctcggttgtcaaactcatcttgtacaatcatctgagtaacctcactgatggggtttaacaaaaggcgatcgcagtctcttcccggagggcgatcgcctttgtcttgttactatattgtagttactagttattaccaaaacaagagcgttactacaaaattttcaaaattcgccacaattagggtaaatagagttattacagattgaaagttttcagcagaaagtagtatggcaaagcggcagacaacaaaattgagcaatcagattattgtcagaatggatgatgagacaaaggaagcttttatgaataaagctaagactgaaggcaagacagcctcagaattgatcatgggatggattcgttcttacatggctgaagaactccaaggaactccagacttagccaaaatgcaagcggacttggagaatctaaaacaacaagttgctgcactccaaaatgaatacttgggaaaattagcagcctgagagaagagaacgattctctcaggctatggatagatcaaattatcagttctgcccctaagaacccaaaaaacccgtcagatgcctgacgggtttagttttgttaaggagattaactatgggaaattatatagttactacaggtaatcaacaagtagtaaccaagattatgactgcgatcgcactcaaatcctttaacccacaggactttcccttacttttttgagtgtgatgtaatgctttacctcattaccatctaacaagtttatgtatctcaacttcattcttgttcaaatccctgattattaaatttgagaacccgacaattctcgctgactgtgcgaatcacgttctctggcactccttcagggacagtgacctgaagttctaaggtgatttctacttcagcatctactaaactactgaggtgttgaataacctcgtctgctatctgtcctatatcacgtcttagccgcaatgcgtccaatttgactgaaccatagaaacgttttggtggaactatgacagttacttggctatcagaggagccattttctgttactacagtttcaatagttttttcttttccagtcttgtagcttcctgttttttctttaactgatggtggagttacaggtttagcagcagcatctgcctcaaactggcgttgcgctatttctggcttaactatcagattttgactgctaagggttacggtaatgtgttcagctgctttcaaaccaagataacgtcctttggattcatcccagcctgtggcataagcaaagttttcattccacagtaacgctgcaactccttctgcgatcgcttgtaatagcacttgttgatttttgatgcgtggcaggtaaaggtagtacgctaagtactcccataactttttaaggtcgaggtggtttacatggcgccagagataagggtcgagagcttctaggcgcaggcggctggcagcatagttagcaatcaaatgttcttcatgaactgctttgcggcttgcttgcagaataggagagtcttgcttttgcaatcgaatttcttgccattcaatctctccttgggggtcaggttgcattggcactaacaaccagatgtaagcttcttgaattaaactttttacatctttgtcggtttgctgttgtttagtcgtcgcctgattgctttgaaaaacatccaagtttaaggcttctttatctcgaataatcgaattccaggcgaggtattggcaaacagattgttctaatagctccagttttgccttgtctggtgccaggaacagcaacatattcttgcagtatcgaggactggctcccttttggttcagtatttcttcagctctggtgcgggcttgggtttcgctttccttatttttatggggatgttgtggccccatgacaaccagtcttacagccatttcatcaggaacatctgcggaggagtcgggagctatatgtactccagcaaattcaccgcgctgtttatcagcctttaatcggagaataatttcatcccaaactttatcctgatcctgttggatttgctcggctctgtcttgggcaagtctggtgacgctaggctgagttgagaaccagtaacgagtgttatcgacataaagatgtgtggattggtcggtaagtcggcgcaaagcgtcgccaaaagttgctgcactttcccctggttgaacacaccccaacttgatccgatgatcttctacaccgcgattggctgctctcagagtaggagcagaaccaaggtaaattgtccgggcgacacgacgacaggcagagtaacgtcctaagttcgggttttggcgatcgcacgccaatggtagagaattatatccatctacatctttttcaataactggcacccagttatcttcgaggtagcgagtcaattctgtttgtacctgtccgtcatccattggcacgctggcaggcatgattaacaaactcttgtcctgtccttcccaaagtgaatgaatcacctttgccatcagtcgcagcacaccccgcgtgcgttggaatttgtcgagagttgaccagtcattataaagtcggtcaaacagttctggatggataggataggcattttctagccgtcgtttgtaactagcttctcggcactcactaggaaactcctgagattggttttggtacatttctgcaaaggcacggatgatggcatcacgggcaataaagccactttcttctgtgatgggttgaaatagccgccgccgcacaatttcaaagctttcatcggcagttgctggtcgccaaggagattcgactctgccaatagcatttttgagtctacttaaggctgctttaccgcgatcgcctccaatctcattatcagatgccggaatactcaccaccaaaagagtttggttagcattttttgccgactcgctcaaagtctgggcaaaggtaaagtgagtgtcaaagctgccccccggaaggtcgtttatttcgtgaagctgtcgggcataagccacccattcatcaattaaaatcaggcagggtgcatagtggttaaacagcagccggagggtatcgccagggtttgttgaagtttcatctgcctctcgaatcatttcataggcttccctaccgcccagttgccaagctaattcgccccagagtgttcggacaactgtgccatcttttttaggttgaggctgaccgggagaaattttatttcctaccagcactgctgtgttaacttttggcggaggtaaaacatttgccgcttccagcactggttccaatccgggtaactcggatgccggaacgcccataaacaggtggtatagtgccagcatcgcgtgggttttgccgccaccaaaattggtttgcagttcgataacggggtcgcctttattgctagaaagacgtagcaaggcatttgtgagcagttgctttagcccttcggtgagaaaagtgcggctaaaaaactctgtagggatgcggtattcgtcggaaccttcatctaaataaacttgccagaggtcggcagcaaattctgcttgttggtagctaccagaggcaacatctgggtgaggtgtaacaatttctcgccagggttttaaaccgcctacaggattgccttctagaggttggagagtagcacgacgagtttcacgacgagcttgttctgtaaagcgtacccgcaaaagttcttgtttttgtttatcaacttcatctgcttctggtgcagaaaaagcagaaagtaaccgcgatacgctatcaagagcgcgataggcatcatctgtagagagtggcttgttgtgcgcccaagagttgcgcgtgtcaattaattccccaaccaagcttctttctgcattgcccagagtctttttgaaaacctcacgccactgattagacatgagtttcaggagtgctgattcgtcctgcttgagaatttgctggacattacgtcttaggctatggtcttctggaacaaaaggtgtagcggcaactacccacttatcaccataaatggaacgcatttccctttccacaaaaggatataagccatctctcaaaaggtctagcaccctgccaactcgttcgcggttacttacggacatagattttttatactagtttttctttgaactcagggctgctgcctcacgatagctacatctactccgggcgttagagccacccagaatgtattaataggctgaggctaataacgagagtcgaaagtaattaaagtaaagccatttgtaagggagtcgattcttcggtttcagcagcgaggcgagaaatttctggccaggaaatcactaagctgttgtaagcaacaccttcagcagcccagccttttctgtcgcaaatgttatagagtcgataagctaattcccttgctgcttctcctatggttcccagttgagatagcaaatttgcagcaccttgatttccagcaccgtcttgcaattcccgaatcatgtgttgtgtggcttcccagactgtgaggcggttatcggtttggggattccaatttttgggtaattcgtcgcggcacaatagtcgtactttacccgccttggcagtgaggatgccagcgtctaccatgccttgtactgctgtattcttagctttggagagggtttcagcatcgccaaataaaccttcattaaaggtatgctgttcataccaaatcaaagcaaagcaagtttcagcatcaaattctccttcttgttcggcgagaaattcatctaatgtttggttaattagttgcagagcggtgcgaacgggcatgggtgtgccgtctgattctaagactttactgtagcgagagtaaattgccataccaggcccaatactggcttgtgctaaatcgaccggggcgatgttgccttgttggagtttttgaaatgcgtcggggagttcgcgtttgagggtgttgacgaattgccgacgagtggtggatggggcagtttcgggccgaggacgggcaacgattacaatcgcagatgccaaagcattagagcttatcgcacgtgttctagcttttttatttgtacggacaggccaagttcctgtaacttggaaaccgctatctaccaaaccttcaagcatggtttcccatcccgtggaagcacgctctgagtgattctctttgtcttcttcttcttcttgtttaaaagcataataaacagtaattggaacatctctacttgcttgtttatagatgttctggaaaacttgtaaaaaaccttcccgaaagtgctgttttgctttttcttctgagccattatgtctgtaagatgtcgcaattagttctccttcttttggagtaactaatgtagcaaagtttgtagggtctatttctttcaggatagcgcgtaaccaagtataaaagaaatctgataaatcagcatagcttatgttgtcataataaggtggatcagttgaaataacatacaagttttgacatgaatcaaaccctttcctggcatcaagttggacaactttagcgatgctactatctacaggtagagaactcagtgcttttgtaacccattcacttgctacagaaaatgataacttaccataaattgggttagcttctgcaaagtcccataccattgatatagtctgacgttgaaagagatgtgctacgttttcatttttagcattccaattagtgaaagcgcagcagtaatcagtcaaccttgaaagtgcacaagccaggtatgtagtgaccgcattggaatattcaaaatcgccatctgattctttaataatgctatcgcgagcttgacttatcaactcacaaaacgtagttaaaactagcagttgacgggatgtgaatagatcagtatgttttgtgaaaccgtagcgttggacgcgaaaacccagtgcttgctctggtaaatctgtattaggttgccattttggggttgctaaagcagcaatattttcatgttctctagtggcaggtagatagaagcgggcgcgttgtccctctgccaccatcgccataagttgcacagctattcgtttagcttgtccttcagaacgaatatagtcaaaatgtactgaggtactacagcataaacaagttgctcccttatttttactgactgtcccttctagtgatgtccccttaccagttctaatctcaaagcatactataggtggttgttggctgcggtctatagttggctcaatccatactttctgcccacttttgtttgatagcacaaatgtgcgtaccaaaggtatctgtgctttacaaacaggattcggacacgtaacagtacgtgcccaaagccatgcagtaatttcctctccatttgggcctttaggataaacttctgctaattgtttcgcagcctgttgttgtatccattctccgtaccactttacgtcttctactagaccagtcaaaccgcgccacccttctttaagaattgaaggatgaggatgaacagggggtcgatttctgaatttgggtggatattctaataaagctcgttgaatagtaaccgctacagggttgaggtcactacttgttacctttaaacctaaacgctgcgcttctaatgggatactagcacgtccgccaaacatatcccaaaactcaggcatttgtccctgaaactgctgtcgaattatttcttgggcttttgtgatgatacgtttgtcagttgttgcatcccaagttgctaaatttgcaacaaaatctaaaagtttttcacgttccttttgtgcttcatccggtggtaggtcatttcctggatcatcaatcagttgtgcaaaaagaatggcacgggaaatagatagtggtgtacgcgcccaccaattgtgaatagagcgagggtgtccttttagaaaaggattttctgtttctggctttgaaccttgattgatagcatccagtggtaacgcgacttcgattagcttcttgcggtaggtcattccttttgccagacttgtataattgaagtctgtatttttaccagcaagcagcacaaaatattccgaatgagtgggcttacggaatcattgcatcaaagaatttactgggctaattagcctttgttgattgctgcttacttaacttagttacagagcttcgtctggcaattatagtcactaaaattagttctgtgcttcgtgaaattacttagaagagcgaaaaaatatatggttttaataatatgaaaagtttttgagaatcccgtctttgctgctaggactcctaaaaccaaaatctgacaagccaaaaatcgagaactacggtcaaggcagtggctctatttgtaaggttatcgaaaacttttcagctttggcaggtacaaaacgttgaatatagtaaagatttctgataacgttaatgttatcagaatagtgcatttaagtgagcgagtggaaaatagaattttatcaatctgctgacggtcaatccccagcaaaagattggtttgatgaacaagaggcaaaggtcaaggctagattaggtcgtatttttgacctcttgcaggagcaaggcacatctgtaggagagcctcatgttaagcacgttgaagacaagctttatgaaattcgagcagaacaaaacacaaatacttatcgtgtaatctattttgcctacactggcaagcgattcatattacttcacggctttcaaaagaaaagtccaaagctacctaaaagagagttggaattggctaaacaacgaatgaaggagcttgtgaatcaagagaaaaatcagcaggagaaagcttcttctccagaaggtaataaatccaagaagggtaaaaaacgatgacttctaacacaatttcttgggattctatccgtgatgaagttttagcagatccagaggtaaaggctgaatacgatgccttggaatctgaattccagtgtgcaaaacaagttattgctttaaggaaggctagcggcttaaatcaacgggattttgcaaagttggttggcattaaacagccacaactagctcggattgaatctgggaaacaggttcctaaaattgaaactctagcaaaacttgctaggagtgcaggttacgatgtcgagattcgctttgtagcacccaaaggaaagcgatcatcgcacaaagtcgagcctttgacgatttctgctaaagagttagtttagtcctgtgattcctctcactaaaagcatccctttttacttggataactagctatccaataaaggaggcagacttaagagcgattactctgacaaaattgcgatcgcagatcaattctctaaaatctccaattattgcggttctgtccccatctgccacaattcttgtaaattgtaatttacactcgtgactgcgaaatctggctctttatgaaacggttgctgcacatagcgaattgaacaattactatcgattacatctgccggaggcactttcaccagtgccaaaataaagttctcaggcttatttaaggcagtgataatttcattcttagttactgtcactgtctgtccagttgcaattcttcccttgacttcaataaaccgcaactgccctgttttcgggatgcgtgactcaatatcatagccgcatttctgggtactcacatcagttggttcgtaccctaaattgcgttctacttccatcacagccgtcattgctgcctgttctacccgctccgtctccctggcaaacattgccgttgttgcctgttgtttgccttgcattcgttgcagtaagcctaccgaaactaccaacgcgcccccaaccaccacaggcggtaatggcgataatctacgttcttgctctaattcctccaagcgttgcattaagcgtgcttgcaaatcatcagctcgctgacgtgccttacctgagttaattttggcattaggcttgccagcttcctcttgcattttcagttcttctgcccgatgatcccagtaattaatctccttagttaatctatcttttactgctgtcatcgtcttagcaataagttcctctttgcgctgcttgagttcttgaagatgttgaggaacaaggtgagcgatcgcataactcttagcttttgcttctaaatcttctcgcaaccaagattcttctaaaactttttccacaacacccttttcctcgtctgttagcggacggtaattgaggtaaggtgcgtaacctgcattgtaggtattgccttctgggttgatttctacatattgcatccgccgcgatactaaacgcctagagccatttaaatttgtccgcgcgtcttgtatggaatgttctaaataaactaaggcgcgggttccctcgctggaatcattttcatcgactaagatagtcccttgtttcaacaaatcccggtgtcgttccaaagtcagatcaattgtggcatccagtagagaatgtccagaacagatgaaagcagctaggggtttaccagaaatgctgattaaatctttttcaaagcagatacgttcgtaacgtagcagcaacggttctcctacaccaatttgccgccctcgattgcgaatgactgccggaacatgactgatttcgtaacgctggggttcacgttgacgcaatgttccacctaattgggtaaatgcttctaggaagaaagaagcaataaaatgaggttgcaaccgtcgcgcttctgccctttccatttcttcccgaatttgctgcactttggcgatatccatcgaatctcgtgccaaagcccgttcttctaaaagttcgcgtagtcgctgttggtcgagtttatcatgtacgacttggttgagtctgtctcgcacctctggttgatcgccatagcgaattgcttcaatcaataactctcgtaattctgtccctgcgatcgctttccccaatacatcaaatactttacctcccagtgccttctgctctgcctctatctttttcaataacgctaaatacacatcgccttcacgagtgccttttgccactaaattccataagtgacagacctccgtctgcccaatccggtgaattcgcccgaaacgctgttctaggcggttaggattccaaggtaaatcgtaattaaccatgaggtgcgccctttgcaagttaatcccttcacccgcagcatccgtagctattaagacttggacttcgatatcttgggtaaacgcctcctgcattttgcggcgttcttcgcgtcccattgcgccatgtatatttaccacagcttcattacgtccaattagcgtccgaatccgatctgtcaaataatttaatgtgtcccgatactcggtaaaaatcaagagtttgcgccgatgtccttgggcgttgaacatttcggcatcattttgcaacagattcgagagttcttcccattttttatctttaccactacgtcgcacccgcagtgccagttgctctaattcttctaaaagcttaatttctgtttgtaattctgcgatcgtccgtgatgctgtagctaggtcaacaacttcctgttctgttgcttctcgttcttcaccaggaatatcctctaaatcatcttctaagtcttccagatccagaacctgcttaaattcaatgatggttgcattacttccctgcctcaaaacttcttcttgcctcagccgtttttgcaacctttcccgacggcgtagcagcgattgatatatagcttctggggaagaagcaagccgacgttgcaaaatagtcaaagcaaagccaacattacctttgcgcccttcattttctaaagcatcggcacgattaaattcctcgcggacatactcagtaactcgcttatacagtaccgcttctaaatccgatagttcatattctatagtgctagcttggcgttctggaaatagcggttttccatcaaacttcagcaaatcttctttaaccaatcgccgcatcaagtcggaagtatctgctacgtgaacaccatcgcggaagcgtccttcaaatctgtctccatccaataacgccataaacaactggaagtcttcctctttaccgttatgtggtgtcgctgacattaataaaaaatgtctagttaaagttgagagtaacttaccaagtttgtagcgtttcgtctctttaatttcaccaccaaaaaacgaagctgacattttatgagcttcatcacaaacaactaaatcccactctgtctgcgctagttttgcttgtaagtcttgattacggctgagtttgtccagtcgcacaatcaccaacggcatttcagcaaaagcatttccagttactgctgattcaatgcgatcgttggtgagaatttcaaagcgtaaatgaaacttttgcgacaattcatcttgccactgtggggctaaactaccgggacaaatcacaaggcaacgatgcaaatcacctcggatcagcaattcccgcatcagcaaacccgccataatagttttacctgcacctggatcatctgctaagagaaaacgcagaggttgtcgagtcaacatttctccgtaaacggcggttatttggtgtggtaaaggttcgactaaagaggtgtgaacagctagcaaagggtcgaagagataagctagacggatgcggtgcgcttctgatgccagacgaaaattagctccatcagcagtgaaactccaagcaccaccagacgtgattatttccaaggtaggttctctgtctcgaaagactaactcatttcctagcgtgccgctagcatctttgtatgttaattccacaacatcagagccatgccactgagcatcaacgatggcaacaatactatttggcaggataccttgtacttgcgtgccttttgtcaaatcctcaagtctaagcatattgcggtgttttcccttttggcagatatcagtagcaatgtagataccaatgttttttggtcggacattgctccttatgaccataagagacactaggctggttagtagctagtatatttactgtttttggctgtggtagcttgatgttgcttagaaaatggtgttgcttcgttgagagatgatttaagcgatcgctccatgctagtggctatagctaaagtgaaatagagtgcgatcgcattccctgctacttagatatctttgcgaaaattatagatgacaaagaatttggtggagccgtgaaggactggatactagagaaggtgtatggcagattgacgcaagaagctagctaaaggttatgcaacaatgctgccatgaaaaatgattgtgtaaaaattgggttacgtgagaagaggagatgcgatcgcccgatcaagcgatcatgattctgatttgcgtatattacacactatagaaacaataattttgtgcctgtacaaatgctgcgatcgcagctttgtgtgaactacatggctcttatttacagttttacaagggctttgaggattgtcggcagttcttttacagtgaatatacttacatttcatttattgccgttacttttttaccaaaagtaaataccataacagaattattctaattcagtattgaggagaaaaagctcatgaaataaagtgagcagcaatattagggcttatatgctgataaattgaggctttatctccccatagctgacttaacaggaacttttcattagtaacagccgtatactcatttacggggccagtaaatttactgtctgcaacttcttcctgcttgttgggattctaaagatttaatctgaattacggatgataaactctcagctagacacaacccttgagtattataagactgcaattgacaagctaaaagcagctggtacgtctatagatactgagcaggttctggaagtgttaaatgctaggaatgctgtgcaggtggctttaaaggatgcaacattcatttctaccagcaggttaaagcagcttctagagttagatgcagaactcaggaaacaggcaggacagattaacaaagttatcaaagctgaacaatttgctctctggcgagaaagtatacatctccctgctgaagcttggtggtggaggttggaaaatcttagccctccccacaagtgggatagtttggattggttgtggaaaggtttggtagttgctggttggactgctaacctcagtttactgattaatattgctactcgctttttcagtgggggagcaggattattgggagcttctgcggttattttgccaagtattctggcattgttacaggcaagtagtgaactaactaaagctggtaaagaaggatttgacaaattactcacaaagctaaatattccccaacacttacaagaagaagctaagttgggatcaactttgttaatgacaatatttttacttggtttttggttggctctaccttcaattgctcagttatataaccgtaatgggctaaataattaccaacagggaaaattaggagcagcagaacaagactacctcaaagcaatttccttggatgccgataatgcggatgctcattacaatctcggcaatctttacgaggatttacaagactttgagaaagcccggaagtattaccaaatcgcagtgggaagtgacgttcctgatgcttacaacaatctagctcgcttatatatccaggataaaaaatattcccaggctagagctttgctacaaaacggactggtgaaagctaatgagcagaatagctcacccgaagtcagatatagcctgtttaaaaatttaggatgggtgaggtttgagcaaggcagatatgaagaagcacaacaaaccctacaagcagcaattggaattgcgaataacccagaagtagcaaagtatatcgggaatactggtgcggcacactgtatcttagctcaggtaatggagcggcaaaaacaaccaaccgcattggaggaatggcaaaagtgttgtgaacaaggttctactctcaatgctgatgaagacgcatggttacatctagctcaacaaaaattaaagaaggcgggaagagtatgcaaaaagaccggaaactgattaggttagttgggatcttactcagcctaccttttatagcggtagcaacacctgggtttactcaacagaatagtctaaattttatctccgaggttaagggagatgtcaaaattaagtactctggacggaagaactatcaaaaagcatatagcggtgacatactaaattcctctgattctttgcaattgggacgaggtgcttctacgaaagtcttatgtaataacttatcaacttggaatgttagctctccaggggaattttcagtttctagtggttgtccatccactgaaaaacccattcttactagaaatggtagtaaccgcgttcggactcgcgctccaaatgatccgacaattccttacatcattagtccgcgtgatacagcgattttgagtggcaaactgactctgcgttggaacgctgtcaagggtgcaactaattatcaggtaaagttacgcgggccaggagttaattggacaactgaggtgaagcagtcagaggttgtttattctggtaacgaaactctgcgaccaggctctcgttatcgggtaattgtgactgctgatagtggagtatcttctgagagtggagcacctgctggattcactttactgagtgaaaaggatgctaaacgggtaaaggctgaaattacacaattgcaaaagcaaccgctaacggatgagtccaaaacccttgctttggcatatctgtaccaaagtatgaatttaaatgctgcggcaattgatttattagcaggattagttaagcaaggaagtagaatcacatctgtttatcagcttttaggcagtctttaccagcaggtaggtttacatcgattaggtaaggaacagtacttaactgcactgaatttagctaaggcagaaaaaaatctggaagcacaagcaataatccaaaccagcttaggggaaattgatatagtccttgacaatttgcagcaggcatttgagtctttgcaagcggctcaaagtggctatcggaacttgggagatgagcaacaagtacagcaactacagcagaaattagatgacctcacaagaaggctaccttcatgaataacctgcgaactagacaagtaataaccctgacgactttgttagcaacagctgggttatgggtgttaatgtcaaagcccacaattgggcaatcaacccctccagtttcaactgctcagtctgcggaattagcagaagcagaacgacttgatcaacaggtgattcaacttgataacgaaggcaaatatagtgaagcaattaccttagcagagcgtgcgttggctattcgtaagaaaatactaggcaaagagcatcccgatgtggcagctagcttgaataatctagcaggactgtactcaaggcagggacgctacgcagaagccgaacctttgtatctccaagctctagaaatgattaagcgcttgcggggtgagcagcatcccggtgtggcaagtatcttgaataatctagcagagctgtacttaagacaaggacgctacgtagaagccgaacctctgtatctccaatctttagaaatgattaaacgcttgcagggtgaacagcattccgatgtggcaactaccttgaataatctagcaggactgtactcaaggcagggacgctacgcagaagccgaacctctgtatctccaagctctagaaatgattaagcgcttgcggggtgagcagcattccggtgtggcaagtaccttgaataatctagcaggactgtacttaagacaaggacgctacgcagaagccgaacctctgtatctccaagctctagaaattaagcatccagatgtggcaagtacgatgaataatttagcattcctgtatgagaagcagggacgctacccagaagctgaagggctgtatctccaatctttagaaatgattaaacgcttgctaggtgaacagcatccctatgtggcaactagcttaaataatttggcattgctgtacgagaagcaggaacgctacgcagaagccgaagggctgtatctccaagctttagaaattaagcattcagatgtggcaagtaccttgaataatctggcattgctgtattcaaaccaggggcgctacacagaagccgaagggctgtatctccaatctttagaaatgattaaacgcttgctaggtgagcagcatcccgatgtggcaactagcttgaataatttagcagggctgtacgagaagcaggaacgctacgcagaagccgaagggctgtatctccaatctttagaaatgaatcaaggcttgctgggtaaacagcatcccgatgtggcaactagcttgaataatttagcaaggctgtactggaagcaaagtaacataaaccgcgctcttgagtttttcacacaaggattaaaggtacaagaacacaacctgactctcaacctggctgtggggtttgagcagcagaaacttgactatataaatactatctctggtgttacaaatgctactatttccctacatctaaattctgccactaacaaccccaaggctattagtttagccctgaatacagtcttacagcgtaaaggacgtattttagatgtcctcaccaatagccagcaaattctgcgtcagcgccttgacccagaaagtcagaaactattatatgagttatctcaaacctacactcagcttgcccatctattttataaccgaccagagaagcttccttttgagcagtataggactcaagttgcccagattgaaacccagatcaaacaactagaagacaaattaagtcgtcgtagccaagagtttcgtactcagtcccagcctgtcactattgaaactattcaaaaattaattccttctgatacagctttggtggaactagtccaatatcgacctgttaatctcaaagcagcacctggcaaaccctttggcaaacctcgctacgcagtatacatcctccctgtaaaaggagaacctaaaagcattgacttaggcgatgctgaaacaattcaaaaagccctagagttattccgcgacgatttgcgagacaaagacactcccatcacccaagttaaacagtcggctcgtaacttagataaaatccttatgcagccagtacgtaaactcttggggaatactcgcaaaatcctactttctccagatagcgctctcaacctcattccgtttgaagcactggtggatgaaaataaccgctacctagtagaaaactattctttcacttatctcacctctggacgagatttgctcagactgcaaaatcattctcctagcaaacagccgccagtcatcatcgctgaccctaacttcgatcgtcctggtgaagtagttgtacgtcaacctaatgctaatagtattgatgcaaaaaatacccgctctattgacctgtcgcagagaacattttctcctctagaaggtactgctaaagaagccgaagcaatttcgattcttttaaaagtcaagcctttaacaggtgttaaagctacagaaggtgcagtcaaacaagttaaaagccccaggattctgcatatcgccacgcatggtttttttgaaaatgccccagcaaacaaagagaaaaccacacttgatgataatcctctattactatcaggattagttttttctggcttaaaaccgcgtcaaagtggcggcgaagatggcattctcactgcactggaaacaactgcactaaatctagtcggtacaaaactagttgtactatctgcctgcgatacaggtttgggaaacatttctgcgggagaaggcatttatggtttgcgtcgcgctttggtaattgctggctctgaaagtcaaatgattagtttgtggaaagttgatgatgatgctaccaaagagttgatggttgcttactacaaaaaattgctagacaatcaggggcgcagtgaagcactacgccaaactcaattagagatgttaaagggtgagaagtatcagcatccctactactgggctgcgtttataccttctggtgattggacatcgatggataagtgaattggttttgagcgtcaggcgatcgctctatattaccaactcaatatgaaatagagtgcgatcgcatccctcgcaaacttcaagctgtcatttagctttgtacttggaatgcgatcgccactaaatcttggaacaaatattcccaaatccttacacggaagtaggttgcaaaactatacaacttttttatttgtttttagatagtagcataataaaattgtataactttattttttcaaaaattctcagtgcctaacgatagaatagtgtttgtagccgcgcaaattgtacaacttttttagttgtttacataatattgtggaggaataaaaaagttgtactatttttcctatgggtgtatctaccaagca

SEQ ID NO: 881 - DNA, 31167 bp, Nostoc sp.
  source 1..31167: mol_type = other DNA
tataaaattatactttaattcttgtgtagaggaataattcggttgaacaataaataattcgattcaacaattaataaaacgattgaacaataacctctgatggagtactattgtactaagtaaaggtgcgatcgcttccagaggttatttttatggtgaggggcagaagggaatggactcaagctaaatatgagcgatatataaaagaaggtcgtggtcgaggaagtggtaagcagtataaaccttggcttacaatccaagatgttccctctaaaggacgttcctctagaactcctggttggaaaacaaatcgagtacatcatttcttctcagaccatgaaaaacggctattttatttgtttgagtggtcagatatagtcacagacataagagagcaatttcctctagacgatcttgatctggcaatgagtatcgctacagatatggatataaagtaccctgtagacacaaaaagtggaactccttatgttttaacaagtgacttcatgcttacagtcaaccgcgatggtaagcagatgcagattgcccggactgttaagccatcaacagaactggagaaaaagcgggttaatgagaaattagagatagaaagacaatattatttagcaaaaggtattgagtggggaattatcactgaaaaagaaattccaaggcttttagtcgaaaatgttgagtgggttcattctgcttacagactagaagcaaatcctgaaatgaatactgcacaactgcgtgagttgtcaacaattttaaaatataagcttcaggaagaagatacagccatcaatacaataactagtgctttagataaagaaatgaatataagttatggtacttcactttatgtgtttaagcatttaatcgccataaaagaagtcattgtggatttggtcaaaataaaattatctgcttgtccgtcaactaaagtttttgaaaaagtcatattttaaacacacatagtatgtaaagaatatggttaaagatttatttgtcaatgatttaatagagtggattgtatatgacaacgctcatgtagtcgaaaggattatttggatagatgaaggttatattattgcatttgttatagatattaatgctaagaaagggctccctgaaccaaagaaaatatcagatattttagaagccatatctgaaggtgttgcttttaagcaacaacaagatccttgggcaagaattattcgggatgaaaatttgacagatagagaaaaggaatacagagataaagcttgggagataatttcatcattagttatagaagaaccatcaatatattataggaattttagaggcttgctggttaaaaaaattgttgaaaattataacgaagaaagggataagaataaattagtagaaaaaactgtctatggttatttgagaagattttgacaaaggggaaaaaatacaaacgctcttatacctgattttatcaattcatcaggtaaaggtaagattcgagggcaatcaggtaagaagagaggaagaccaagaaaatatgcacatgatcctgatattggtgaaggtgtaaatgttgcagaagaagatagaaagatttttagaatagctataagtaaattttacaataattcaaaagaaaactacttaacaacagcctatgaattaatggtaaaggaatattataaggaaggaattagatatgacgaaaatggtgtacaaaaatctattttaactccgactgataaaatacctacaattacccaatttaaatattggtatcaacttgagcaggatgacgttaccaaaactttgacatctcgaaaaggagccaaaagagtagccttagagaatagagcaattttgggaacttctaagatggagactattggcccaggttctagatatcaaattgatgctacagttgctgatgtatatttggtgtcaaaatataaccgtaattggatcattggcagacctgttatttatgtaatcattgatgtttttagccggatgattacaggtgtttatgttggtttagaaggcccatcctggacaggcgcaatgatggcgctagctaatgtagccgcagataaaaccctattttgccaggaatacaacattaatattactgaagatgaatggcctagcaatcaaatgccagatgcaattttaggagataggggagaattagcagggatgaaagtggaaacattaatccctaatctttatgttcgtattgaaaatgcagcttcctatagagcagattggaaaggtttagtagaaagacactttcgtataatccatgaacatgtaaaaccttttttaccaggttatgtagatacggattttagacaaagaggtgcaagagattataggctggatggcaaacttgatatagatcaatttactgaaattattgttcgtttaattgttcaccacaacaataaatttcttaaggaatacgaaagggatgaagcgatggttgctgatgatatacctcctatacccagagagttgtggaggtggggtattaccaatcgttctggtagactcagaactttttctgaagatattgtcaaattgaacttgatgcctactgagaaagcaaccattacagctaaaggcatcaaaatgagaggcaaggagatgtactatacctgtgatagtgctgaaaaggggcaatggtttgaaaaagctagaagtaatctcctttctaagtcagataaatcactaattgtgtcttacgataccagaaacccaaacttcatttacctgccatccagtgatggtagagattttgaaaaatgttttcttatcgactcagaaggacggtatgctaataaaaatttttatgatattgaatatctacttgcttatgaagaattgcaaagacagaaaagccaaggtcaacagctacaagaaaaggtagatttaatagctgatattgaaagcatagtggataaagcagaacaaatgactgatgctgctcaagaacctaatttaagtaagaccaaaaaagtttctggaataagagaaaatagggcttttgaaaaggctaaacggcgagatagcgaaggatttgaactagcaattacagaaaatcagagtagttttcaggttatagagagtaaatccgaaacctccgaacagccagaatcactacagccaaatcatctgaatcttcttaagaaaaagcgacaggagcgaaaacgtggacaggatcgagggtgaactggttaaaattcctaatggagaattagcagttattgccagatatatagatcaaaaacttccagaatacaacgttaatccattaattcaggcattacctcatattctctcagcagaagaatttatcgatcaagtaacgagaacaccagattttaatgaacgagagaaggagctagaaacacattataggtttcattgcattgagaggctatctagatattttgatcctcaaaataaaacggttgaactacagaaggttatttgtgcattaattatgacaggctatttagctcggaatattctgaaacctgaatatgcaagtcgttctaggcaaatctataacgcaataaaacatggaggaggtaaaaacttagaaaactatgttaatcttcctacatctgcttctggtttaaccctaattggcccatcgggaatgggaaaatctacaaatttccaaaatattcttaatctttatcctcaagtaattcttcatcctgattatagtgtttaccaaatcgtttggttgaaggttgattgccctcatgcgggttctttgaagggtctatgtactgatattttccttgctgttgacaggttattaggtactaactactttaaaaaatttggttcctcgcgcaactctgaagattatatgcttgctcaagttgcccaaatagcccatactcatcatttaggagttttagttatagatgagatgcagaatctggttacagcaagaagaagtagctcagatatgttgaactttttagttaaaatggacaatactgtaggaattccagtaattcgagttggtaccaatgaggcttttcctattcttcagggaaattttagaaatgctaggagaggcacaggagaaggaagtgtaatttgggacagaatggtaaatgatgatgaatggtatttctttatggaaggaatgtgggaataccagtggacaaaaacgtttgttccattctcggatgaaataaacgaagttttttatgacatgtgccagggaataattgatattgctgtcaaactttacaaaatggttcaatggagagcaatttcaatcggtgataaagaaattattactgttgacctaattcgtcaagcagctaaagatggactatatttagtcaagccaatgctagatgcaattaggtcaggggacaaggagtggatgattaagtataaagatattgctcctctcgatactacagaatatcaaaataaatgtctatctgagcttgattataaagatttgaaggagattaggagattagctagaaagcagcagaatcagcagcaagtatcgccaaagctaaattatgtaattcttgagcttttgaacttggaaatagaacccgctaaagccaaggaatatgcagaaaaaactgtttctagtgatgaagatgcagacatcccatctttagttaagaaggcatatgctcttgctttgcaaggaggtcaagtaaatgaaaaccttgctaaaacaagtaccaagaaagttaaatcaaagccaaagtacaaagagaatgatattcgacgaattgtcgagaatgcaaagaaagagaaaaaatctgcatatgaggatttaaaatcagcaggtataatcaaaaatccaattgaagattttataaataagtagctggtgggaattaaatataagatggacgtaggttgggttgagaaacgaaacccaacacccgcatgggttagcgatagcgtaacccatcctacaaataattatgcctccctacttatttagcttctcaatgcttagttttttcccaacgccatatcctgatgaacttttatatagtgctttggctagatatcatatacgaagtggcaataaaaccttcaagcaaactgacttagaactatttggttatagttctcagcaactatgtaaagttactttaactaataatttgaattatttagttaaaaacttgtctttattttctcagttaacagttagcgatttgctacaaaattatactctataccctttttattcaactttcttaatacctcagcaagcttggcaattacaagactctatgaggaacaagctaagtggctctattctagaggttgcaaaagtagctaatcatcctactgaaaactcaacaaagtttttaaagttttgtcctgtgtgtctaaaaaaagatacacaagaatatggtgaaccatactggcatagaattcaccaaataccaggtatattagtttgtcccacccatagaattattttgcatgatagctctgtagctgttgattctaagggtatacattatcatgctgcgagtctagagaactgcttgtgcaatcaaaatcaagtcaaatatactgatagcactgtagaaaaattattaatcttggctcaggatatttgggatacaagtaatattaatatttcttttaaaggtttggcttggctccgcaatcaatatcagtcctatttaattaatcaaaagtttatgaacatcctacctgggggtaaatttagatttaaccaaaaatctttttcaaattccatccgtgattgttatggacaagaggttttagaaataattaatccaaatttaatcaaaaatccagacaaatacttttctagttatttactgggttgtgatcttaatccagtaattgaccggattacacatatattgataataaaatttttagctaaatctgtaaaaacattttttacataacatagttgttagattacttaatatacaaatatattttttcgcaaaaaatatattaatttacttgaaattgcataactattaaagacgtagcaatagagtatggtagagaaataacatcaattaacctcagaagtagtaatttttctgagacataaaagaaatgggcgatcattttcacttatcaactcagaaccatgtaaaagatgttttaaatcctcagttaatctacgtggacttaagctttcgtgtaattggtcagactttacccatagaccacggctatggtttgtatgctgcactgactcacttacaggacaaacttcattctctagatgaccttagtattcaaactattcctggtattcctgatggcaaagattcacttaatcttaataaccactctaggcttcggattcggctaccagtagaaaaaatacctttagtttatccgtttgcgggtaaatcactaacaattggcaggcataagattcgtttagaaattcctcaaatgtatctccttcaggcagtggagaaattgcgatcgcgtattgtggttatcaaaggatatgaagaaccagacgcttttttagcagcagcgcagcgtcaactggaaagactgggtatccagggaatagccagtatacctaccaaagctgatggcaaacccaaacgcagaagtatcaaaattaagaaatttacagtagtaggttttggattggaggtaacaaatttaagcaatgaagattcaataaccttgcaaaaatacggtgtcggcgggaagcaaaaaatgggttgtggagtgtttgtaccagttaacgaaaagcgatagcagttgttcaacagcagatgataaatacaacagctaattccaaaattcagttaaatctaggcgaatccagcactactttgttacatcgcgcaggaatagcaggattttggatgacgcttaaacagttggaaaaaatatatccaaatcctgatcaacgtactggtaatttaacctgggtgctaacaccctatagcatcagtcttaactgggaagggcaggatttcgcagctttagactggttgctaaagcaatcttttcaaattagtgatgagggtttaatttccttaataggatcaaacctacaagcaatggatattgaaagacaaataataatccatcaaggtattacaggaacttttttacagcataatcagttttttaaatcttcaggcaagaaattaaagtctataattgttgacagcaaaaaatttgtgactgagtacaaaagtgctatatcttatgctcatcagcactttgctataaagttgtgtgacgaatcaggacaatttttacaagagccaattggtatagtaggttggctttatccaggagcagtagttcgtcactatgcttttaaagaacaaactcaatttgaagaaaaaccagagtatgccctagctttattgtttgctcctgtggcgtgccattattttattttgcgatcgcacaccaaaccccaatctacaaactatattctgcttgtccctgaagtaaataatttagagctttacgcccagtattgctggaatctgagtaatttgagttacagagattttaatgtatctagcttaagagaagctggattaaaattcctaactactcaaacagcagtacaggtaaaccaaaattgtgttaaacgatgtcaggttttttcttttggtacgctaatttggtcagaacagcaaaaagttcgtacagaaatagcaacgttaaagctaacggaaaaagtgagcttctactataagcttagtcggagttgtttccccaattaccgaatcgtttactatggaaatcaacattttatccttacaagtctagttcaaggaataattgccaataatttaggcttggggttgccttggtggaatgattttggcaacaaacttacatctagtaatttgtttaatcaaatagctgacgaaagacaaggaatttatacgatgattcaagagtttgaatgggacatagaatcgcaaaagctgtttattaaagcctgtcatgaagcattaaaggtaacatacgccaaaatttattcccgaaccaaggaaaatgaatacgctcaaattgaacgagaaaatacaaaaattatatctcaactaggacgctgcactaatgctgaaaattttaggaaatttattgcggaattttggggtaaagcagggcaactttcaattctacaaaaacactgggaagaattactacccataacaacaggtatgatgaattggaaaatggctagggatttaacttttattgcaattgctagttatccaaaaactcagaacatcaagcctgaatcatcagaaatatctcagacaagtagtgaatgattaaaattttttctattttattaaatcaatgatgttaaattttagggtaaatcctcaatgtctcatctgtttggtaatattttaactatttatggtactgctgctaataatcgtggtgaaaatgaaggtaatatcactaccctacaaaaaataaactggaagggcgaagttcacactactgtctcagcagaggcaattcgttgggcactgcggtactactggcaaaataatggttatgaagtgaatcggcgttgggatgaaaatgcccagccactcgctgatcacatcttgcaagaccttaactttaataatgttcgcttcattgatgatgatgttttaggattcatgcaaacagaagccgcaagagttgaagctggtgatcaatctggaggtgaagtccaggaagcatccgcaggagaaattcaaaatgtatctcaagatgaagaggtaacaagctctaaaggcaagcgtaaaaaaacttcgcaacgcaaaggacgagaaagaccacaagggagagtcgcggctaaaagaggtgtactagaggttactcgtgcagtatcgttgattccctatgaagggaacattacttttaatgcagtcagtggaaaaaaaggacgaacttctctttatggtacagaagttcatgctactcgttatcagtatggttttgcattgacacctaacagtctccaagataaatctcggagcaatgcagttttaaatggtttaatttcaattggagaagtgggaggaaatcatgcccgttttttatacgatttttccccagatagcataatactacgctggacacatgatttctcgcctcgttttttgtattgctttgaacaagatgaatggggaaatatatcagttccagatttggttagacgggtagaagctgaagatattgacccaaaggaattatggattggaggagcaattgctagagatttaggaaatttgggtgcaaatgtgttcccaggtgtgaagaaggtagtagaagaattactaaaggtcattacacgagacttacaattgctaccaaggagttaataatgtgacgactattgccttaaaagtagaagtccctatcgcttgttttcgccagtctcgtgctagggagtatgtagaaacctatcctgtaccaccaccatcaacagtatatgggatgttactgtctcttgtaggagaagttgatagatacaaacactgtggggtaaagctggcgatcgcacttatatccgaaccagcaaagtcaactgtaattcgtacctttcacagattgaaaacgaagaatattcatgaccctaaaaataataaacctgattaccaggaggtacttactaatattgagtttgtagtttgggtagatgctggggtagataaagctaaaccaaatttagtgcaacgtttagaagaggcatttactaacccaggttctattaatagatttggtggactatgtttaggtgaaagtcgagatttagtaaatgatattaccctcttaccaaaaaattactatgcagaatcaatgcggtggttaatccgggatgaatacgggttgctaactttaccttattgggtaaaccatgtaggttcgcggggaacacgatggttaagttacgagattcaagaatgtcaagtattgcaaccgcctgaattatcttggacttcagttcaaagtgattaggggttatttttttattttgcaagtacctttacttgagaaatctaaataccatgagcaatagtcttgtcttcttatttaacaagccttttaagaattttatatgcatccaagatgcttgcaatttcctgaaacactctcaacacaagacttaaggaatttaacaattttctttgtgctatgaatagctatgaatttttgcaactggactaatcttcagtgatagatgcttgtaaaattgaaatggagcttaggcaagtcaacaagtttggcaatcgccgtgcttcaacattagatgccattaggcgttgagcagactaattcatcaggcccaagttgggcctagtaatttgtgtttcagcataggatgcctttaggcgttgagtagcaagcacaagcaatatttctcattgcttataatattcagcttgaaaagcatatattattaaccgatagtaaacaaagtaactcagtaataataaattaaatagcatcagaattaaggaaatatataagcgatcgcaaaaaaaattctagatacaaagaaaaacgctacatgacttgtgatcaccctgaggggcgatcgctccacctaaaagtaaaatattcgcatactcttggtagtgatttgagcaaaccttggatgcaaaaacatgaaaattttgctggtagaggatgacatattactcgctcaggcggtagtagagttgctgagtgcaaataattacactatcgacttagccaataatgggcaaactgggttagacttcgcactatcagcggaatatgacttgattttgctggattggcaaattccgcaattggatgggattagtctgtgtcagcaattgcgatcgcaaggctatgctaaaccaattctgttactcagtgcgaagaatagcaatgtagatgtggtgacgggtttagatgcgggagcagatgattatgtgatcaagccttatcacccggaagcattgctggctagaattcggtctttgttgcggcgtagtgggggaattacatcatctaagttaacttggggaaatctctgtttagaccaaacttctgcccaagtcacttataacgagcaggtggttccgctttcggcaatagaatacaacatactggaattatttttacaaaatcccaatcgcatctttagccgtcaggtgattctggatcggctgtggggatttgatgatgcgccaattgaacatgcagtgaccactcatattaaagatatccgcaagaagcttaaggcttctggtttcaccgcagagattctcgaaacggtgtatggaattggttatcggttaaagcctgcaccagagcctttggctgcaacacctggggcaattgtagatggaaaggaaaacaaacaatcaccccaaagccaagattccgccccgattaatagtgtgatggaaaaatttcgtcataccttccagcaacgggtgacggtactggagcaagctaaaactgcacttcaagcagggaatttgcagcaggagttacagcagcaagcagtgcaggaagctcataagttagctggggcgctgggtacgtttggttatccagaagcttcgaggtttgcacggcaattagaagaattactcatacataatcgctaccagacagatgaggaaattactcagttttctcatctggtgacggcattgcaacaggaattaactaagccgcctgtgactgtgactgctaaaccagcacctatgcgccagacttatcgcgtgctgctgattgatgatgatacaaccttggctgaagggttgctagctcaagcagatgcttgggggctgcggattaaaatcgctactgatttagcaactgcgcgatcgcgcctggctgtagcaatgcctgatgtggtgctactagatttaagctttccggatgcagcagaagatggattagcaatactgcgagaattggcagaaaaatcaccgcaattaccaattattgtatttacagggcgagatagcttaattgatcgcttggctgtgtcgcacttaggcgcaaggcaatttctgcacaaacccgcgaccactgagcaaattttacaagcgatcgcccgcgtcatacctcaacgccaaacctcccaagccaaggtgttaattgtggatgatgaccctgtaatgctggctggcttatcagcaatgctaactccttgggggctggaagttacaactctctcgcaaccgcagcaattttggcaagtactgctggcaactgctcctgatttagtgatattagatttacagatgcccctagttaacggattagatttgtgccaagtcatccgccaagatgctcagtggggtgatttaccgattttagtggtgacagcctatactgatgcagaatctctccagcaggcttttgcggcgggagtggatgattttatcaccaagccagtaattgggccagaactggtgactagagtactcaatcgcattcagcgagtgcgatcgcgcttacaggctgggagagccagcaaaggtaaggaattatgagaagttatcagcgattattgccttatggaattgcgattggctcaactgcgatcgccttaatgctgtcactctggctagaagatctgctatatcgcacaattggagcttttttctacattgcggtgattttgagtagttggtatggaggttttcaaccaggttgtgtcacagttgtgctttcggtactggcaattgattatttcgtgattccgcctcgatatgcatttcttccatcgcaaccaggggatgtattgcgcctagccctttttttgggtgttgctttgacgatgaatctactcactgccaattttcgcaaaagtaagcagaagattgacaaactcagccaaaaattagctcaagaaaatgccgagcaactgcgaatggctctatctgcggcgcagatggggatatgggattgggatatcgttacaggaatcatcaaatggtcaccagaacatgaaattttatttggcttaactcctggtagctttaatggtagatatgaaagttttgaggcctgtgtacatcctgatgaccgctcattaactaaccaagcgttacaacaatccttacaaacccatagtgcctacaagtgtgaatttcgggtaatttggccagatgagagtattcactgggttgagggacgaggacaagcattttataaagaagtagatcagcctatccgcatgacgggaactgtgatggcgatagacgatcgcaaacgcagcgaaactgaacgcttgcaatcacagattttactgtcacagcaatttgagcaacagcgcttagtgatggaaatgacccagcgcatccggcgatcgctcaatttacaagatatcttgcaaactactgttgatgaagtgcggcagtttttaaggtgcgatcgcgtcattatctttaaattttcccctagttggggtggaactattgttgttgagtcggttgtggatgaatctttagcgttgttacctttagaaatctacgacccttgcattggtgaagaaaacgttgcaccctttcttcaaggcttagtcaccgccaaaactgatatttatactgccggaatcagcccttgtcacgttgaatttctcgccagcctgcaagttagagcgaatttagttgtcccgattatcgaagacaatgaattatggggattgctggctgctcaccattgtactgctcctcgtgaatggcaagctgtcgaaatagatctaatgcgacagctagcttcccaaagcagcgttgcgattcggcaagctcatttatttgcaaaagtacaaaccgaactaatagagcgccaacaagcccaagcagctttgcaggaaagggaagcaatcttacgcttatttgcccagtatgcacctgcggggattgcgatgtttgatcgcgatatgtgctatctcatgtccagcaaaagatgggtagatgactataatctcgattcggtggcagcgctaattgggcgatcgcactacgaaattttcccagaaattacgcagcgatggcgagaaattcatcaacagtgtttagctggggcgactgcaagaagtgacgaagatttgtttgtgcgcttagatggtaaccaacagtggatacactgggaaattcacccttggtatcatgctacgggtgaaattggcggcattattatttttagcgacgatgttacagagcgcaaacaggcgcaaattgccctagtacaactaaatgttgaactagagcaacgaatagcagagcgtacagagcaattaaaggaaataaacgcgcgcctactagaaacggtgatagagcagcaacaaacccaactgattctgtttgaacaggcgcaaattctggatctagcacatgacacgatcatgaccctggatttgaattggaggattaccttttggaatgagggagccgaacagatgtatggctttcttaaagccgaggcggtggggcaaatttctcacgatctactgcaaacccaatttcctcaaccattacccgaaattcaagcccaattcttagcaacaggttattgggaaggagaactgatccatttcagacgagatgctcaacctgtaattgtagctagccgttgggttttacaaaaagatcatgctggtaacccgctgaaaatcctagaaattaataatgacattacatcaacaaaacaagcagaaaaaatgcttgagtttcaagctgtcatcacccgcaacatggcggaaggagtctgcttagtacgcgctagtgatgctgtgattgtctatgccaatccgaaatttgagcagatgtttggctatgattctggtgaacttaacggtcagcatgtttcgatgattaactatggtaacgaatcggtaactgctgaagatgttaatcaagcaattcgagctgctgtcttatcaaagggtgaagccacctatgaagttcataatgtcaaaaaagatggaactccattttggtgttatgctacaacttctgtatttagtcatcctgaatatggcgatgttctggtagcagttcaccaagatattaccgatcgcaaactgatccaagatgctttgcgcgaaagtgaagaaaagtttcgccagatggcagacaacatccaagctatattttggattacggatagtcactatcagcaagttctgtatgtgagcaaagcctatgaaagtatttggcaacgcagccgtgaggaactttaccacaacatatcggcttgggttgaggcagttcatcctgacgatcgccagcgcctagatgttcaaattagtgaacaggcaaacacaggagaacaagataaacaatatcgcattatccgccctgatggttccatacgctggatacgcgatcgcgcatttcccattaaaaatgaacagggagaaataattcgcattgcaggtattgcagaagatattacagcgcagcaagaaattgagcaaatgaagcgagagtttattggcattgtcagtcacgaactccgcacacctttaacctcaattcgtgcatctctgggattattaaatagtgacctctacaagcaaaaaccagagaagtcccagcggatgcttgcaattgccgccagggaaagcgatcgcttagtgcgcctagttaacgatattctggatttagaacgtttagactctggtcgcgttaccttacaaacaactatctgtacagtcaccgacttatttgaacaagctgtagccggggtgcaagcactcgccaaacagcaaaatattaccttaaatatacaacctacagatgctcaagtttgcgtcgctgctgatgccatactgcaaaccctgactaatttattaagtaacgccatcaaattttccccggctgattctacaattactttgagtgtggaacagcaaagcgatcgcgtattatttagcattagcgatcaaggaagggggatacccaaagataagttagaaaaaatcttcaacagatttcagcaagtagatgcctctgactctcgcgtcaaaggcggcacaggcttaggattagcaatctgccgtagtattattgatcagcatggcggtaaaatctgggcagaaagtaccctgggcgttggcagcacatttttctttacgctgccattggtgagggattagggattggggactggggactggggattggggactggggactggggactgggggacaaggggagaaatttttattctcaattacccattaccaattaccaattaccaattaccaattaccaaatgacaaatgacaaatgaccaataacaaatgacaaaacaagtattaatcgtagatgacgaagaatgtatcctggaactggtagaggcttgtttatcagatgtgggcggatgggatacattaactgctgcatctgggacagaagcgctgaaaatcgctcagacacaaaaggttgatggcattttacttgatgtgtctatgccagagatggatggctttgctgtgtatgagcaacttcaggctaattctgttactcaatcaataccagtcatttttctgacagcgaaagtgcaaagtagcgatcgcctgcgttttgcccaaatgggaattgccggagtgattaccaaaccttttgaacctttcagtatttctcaggaggttgctgagattttcggctgggatgagtaattgcattgttaagctttgtaatcttgactttgtttttacaagttttttacttttgtaatttatttttcttgtgtagcaaacatcttttaattcacaagaaaaatatatgagcatttgtcagattgaatcgctggaagcaattacacaggtttctttatttccacccccaaggcccactgacagtaaaattgcagagaagttgtttggggtttcaattatacacccacaaaccgtgattatccgtgctgttaatccgcaacagcaacagcaaattttagctcatcctctaaccgagcgagaactttgtgttctgagaatgattgttgatggtaatagcaatcaagatatttctgaaaaactgtatataacaataggaactgtcaaaacgcacgttaggaatattttcaacaagcttaatgtagacgaccgcactcaggctactgtcttggcactgcgttctggcttagtagattaagacatcgcttcaatatcacaagtctttttctggagtagggttaaatgttgactgatgaggtagtgactttgtctaccaaaactattttgctcattgatgatgaagtctatgtacgagagatgatagagctgtgcctccaagatgtagcaggttggaatgtgataattgccgattctttattagaaggattgcataaagctggacttaagcatcctgatgcgattgttatagatttatctatgtactctatagatagttttaaatttctgagcaaacttaaaaatcatccagaaactcaagctattcccattgtgctgctgagtgtaggagtgcaatggttagatacaaaatttttacaacagtaccaaatcacaggtgtcatccccaaacccttcaatcctttgaaactccatattcagattgcaaaaattctgggttgggactcataaggcaatagagttaagttaagaaaatttatgcgctagggtaggcagaggtagcagagggagagaaaaaggctgatttcaactgtattgcctcataagggactttcaactcaaaaaatatactatcgctttcttagcagaggactagtatcgctgctcggaattcaaatttcgttaacaagttcaggctatagagtcataccaatttgaaaaaagaatgcgacagattgtaggggcaaggcaatgccttgccctctagaatatattgatgtgtcgcaaacattatttgaattggtatcagcataattgaaagttgcgactatcgttaagtcaatagcggctttcctcaactcaatagcggctattctcaactcagtagcggctttcctcaactcaatagtggctattctcaactcaatagtggctattctcaactcaatagcggctttgctcaactcaatagcggctttgctcaactcaatagtggctttcctcaattcaatagtggcttttcttaactcaatagcggctttcctcaactcaatagcggctattctcaactcaatagcggctttcctcaaaggatctttgaaaagtcatgattgatgtatcaaatattttttacccttacagatagtacttgtgtgtacaccatagcccaccaggagaggggagcaagagatttaattccccttctccaggggaagaaggggtgaggggatgagggcaagggtttttgtacaacactcgccgtatatagcttttagcttaagttaacacgtatgccctacgccttacccctacctacccatcttatctagctgaatctacttaagtagactttagttattagtcttggaattaaatgcaagatgagatgacaactcagccagagggtatcacctttgcgctataacatgcatgaatctgccaaaaagcccttgtgcgttctcattcggctttatatttattaatttattactcaagtattgagatttattacataaactcgctttttacaagttttttatttttcattcataaatttattttgttggtgattccaccaacagcaaattaactgccattcaatttattgaataaaaaacaaatttatgacaagctgtccttgctgttctcatcaaatgctccgccatatccggttacatgaagcctattggttttgtcgccactgttggcaagaaatgcctaatttcagttctaacaaaaatcacagaattttaggtctagaaaaaacactcatatcaatcacaaatgagtcaataaactcattttaagtttctgtattttctcctttagttacgtaaatagtgtagagttggcgactgcaataataagtacagcagcttttcggtaatttatgtacaaaattcatcatatatctcttgttgaataaatatctagccactagagatgtaacacaagcataaaatctgctgtattaatttataactaataattcagcataaataatttactggatctaaactagcgaattgctccgtgaaacctttttatcaagtattagttatcaattatcaatattttggctttttcttagaaagaatcatatctatttagtttacagaattagctaattatctaaaacaaaattgcggtgccgtatggctaggaataaagatgagtactgccttgtataacagaaaaagcaataagaatattaaagttctagtagttgaagacgatcatatacttgctgtcaattttcaagaaattttagagtctttagaatatacagttgttggtattgccaactctgcagaaaccgcaattaccaaagcaactgatttaaaccctaacttaattttaatggatgtccagttgcaatatgaaatagatggaatcgaggcagcaggagaaatctgggataatttgcaaattcccattatttatgtaacagaatattctgatacaaatactgtagatcgagcaatccaaacttttccctttgcttacctgcttaaacctgtaggtcggcaagatttttacgtttctattcaaatagcgttgaacctttataaacgtgaaaaaatttttagtactgtgcttcatgcaatcaaacatggcgtgattgtagttgattctcaattgcgtatcgagtacatgaatcacgtagcgcaaacactcacaggatgggaatttaaggaagcaaaagagcaagtttttaccactgttttgaaactgatagatcaacaaaatctgttgaatattaaaaatcctattatctcagcatttcaaaaagaaactaccatctattatcacaaaggtattttactaattgcgataaatggaaacattattcctgtggctactagtgctagtgcttttaaagatgaccaaggtgaaatcacaggaggtgtaatagttttttgggagaacaggtaacaactaattcaaaatttacttcaaattcgctgtaatacaaattagaacccatactattacactcaagctacgcgtagtttatctaacaggaaacgggaagcattgtcatacgagtagcacttggcattacaaaatgcaaaaccatgtctaacactaatcaccaaataaataaaaaatatgcatttgacaaaatctagaaaaaatttagtactaattgcagattatgaagcaagttatcaagctttattcaattttattttagagaaaaaacaatgggagataaatcaagcccagaatgctacagaagcaatacaaatctcgtgtaaaaggcaaccaaatttattatttttagatgagcgaatgccacagttactcaaacgcgatatttattcatatctcagaacctatggaattaaattaccagtaatctcacttactgactatgaggctttaactaaattagtatccttcaatatctctattttattaatcaacaatttaaaaacttatattccgggaaagagcttgaatctggttaataacgtagttcagtagtacatttagcactaacctaactgagtaagataacagttaaaaattcagaatcatgcactatttctacttaccgacaccaaacgataataagcaaacatcaaattaccaaaatcaaaattatgaaatctcaaaaattggaaaaacgtagagccataatagcagtttatgaagaaagctatcaagctttactcgcttttattctagaaacagaaggctggcaagtaaacgaagttgggagtgctacagaagtaatagaaaaattatgtacagaacccccagatttattgattttagataatcgaatgccacaactaacaaaaggtgaaatgtatttaccgttgctcgcacatggaattaaattaccaattgtactacttactgaatgtgtaaatctagataaattagctctatccttggatatttttcattgtctagagcaacgatttgaactgccatattctttgaaaaaaattaaattagcttacgaacataccttagggttaccagtataaataagcttagtatgagagtaagatttagcaccaatttaacctgaaagaatttgccattataaaaatcatcaatttaaatacttggagaaataatcaactatgctatgtgaaaaaatgggaaaaaggaaagtactggttgccgatgatgaagaaagcaatcgcactgtcatgacttttatattaaagcaagaaggttgggaagtaagtgaagcctgcaatggtaaagaagcgctcgataaagttttaaaagaacaacctgatttactgattttagataatcgaatgcctatcttaacaggaattcaagtttatcaacaactccaattacatggaattaaaatagcagttgtattagtttcaggcaataataatttaaaaaaagctgcctcatctgtaggtattgttcattttatccataaaccatttgattttactgattttttgcaaaaagttaattctgcttatgaataccttatacgcgatgattaatagcttatgcatacataaataaatttttctacctccataactcaacaagagataatttgtaaataaaagtaaaatacttactctgtaacggtttcaggaatttaagataataaagcatttgtttgtagaaatttagagattgttttaaaagtattttgctgagactttagataggtattgatcccccctacccccattaaaaaaggcggaaatagaatcaaagttctcttattgaagggggatttagaggaatataaaagtatttgatacatcactaagtagggaggcataattatttgtaggatgggttagcgatagcgtaacccatgcgggtgttgggttaccctacgggaagccgctgcgcgtctacgttcctcaacccaacctacgtccatcttatatttaattcccatcagctacttagggacttttgaaacatcttctaaaaaaagttaaaaattcaaataataactttcatctgttttcttgctttagtctgtagctttaattctgcttgcctattttccaaaaattaacttgaaataaaatgcaagaatcagcgtcatttaattatccagatttttttacttcagaacctatagatttaagcaactgcgatcgcgaaccaattcatattcctggtttgattcaaccgcatggggtgttgctatcattacgagaaccagaacttgagattttgcaagttagtgaaaacgtagagcaaatattaggaattaatgccgaaaatctcatcggtaaatctctcagcgtcctgctttctcaaacaaaagttaaagaaatatctcaatatctcactcaaaataatttaaaaatatttaaccctttaaatttaaaaattaagcaactcgccgcagcatcagctaaccaaaaagcacattggcaaagctttaaggtgatgatgcaccggagtgagggacttttagtaatggagttagaacctagccgtatcagtaccactaaacaggttctccagttctatcatctattagaagaagcgatcgctcagatacgggatgcagaaagtttcaatgacttgttagaaattatcgtcaaacaagtgcggttaattactggctttgatcgggtcttgatttaccagtttgctagcgataacagcggagttgtagttgcagaagaaaacgccaatcatttaaacagctatttggggctacattatcccgcttctgacattccacaacaagcccgccaactttattacaatagctggctgcggctgattcccgatgtcaactatcaaccagcaaaactaattccttctcataatcccataactggaacatcactaaatctcagtcaagcgaatttccgcagtgtgtcgcctctccatatagaatatctgcaaaatatgggtgtagctgcttcaatgtcgatttccttaattaacgagaaacggctttggggattgattgcttgtcaccatcacacacccaaatttatagattatgaaacaaggaaagcctgcgaatttttaggacagtttgcctcaatagaattagtttatcaacaagaacatgaactaaatcgctatcgctcccaagtgaaactaattcaggaagaattgcgaacaaatttatcgcaagaagtcggctttatagaagcggtattccaacgtcatgaagagtctttattaaatttagttcacgcccagggagccgcaataattttagataatacaatttcgctacgaggtgcaactccatcaatcaaagacgtgcaagcattagttacttggctattgcaggaacattgtcaaccaatatttgtaactgattcactaccacaactttacccacaggcacagcaatttcccatgattgctagtggcattttagctatttccattttgctgcaacaaaagtcttatcatattatctggtttcgaccagagcaaattcaaatagttaattgggcagggaatccccacaaacctgtttctattagtaccgatggcgaaatccgcttaacaccgcgtaaatcttttgaactttggcaagaaacagttaaagaaacatctctaccttgggaaagtgcggagatggaagcagcattagaaatgcgaaatactctaatgctagcagtactagagttttcccaagctgccttagaacaagccgcagaacgtgctgcgatcgccaatcgtgccaaaagtcagttcctcgccaaaatgagccatgaactgcggactcccatgaacgccattctgggatttacgcaattaatggtacgcgatcgccaaactcccgaacaatttcaagagcatctaagcatcatcacccgcagtggcgaacatttactagccctaattaacgatgttttagagatgtcgagaattgaagcaggacaattgctactcaacgacagctgctttaatttacatcgactgctgcactcactcaacgagatgtttgccctcaaagcctcacagaaaggcttgcatctgcaaactgaacaagatgcaactgttccccgttatgtctggggtgatgaagccaaactgcggcagattttgattaatttgttaggtaatgcgattaaatttactactagtggcacggtaacgctgcgagtacaagctttgccagcaagcaatcctactgttacacaacctaaaccctcaatcaatttactactggaagttgaagatactggatgtggaattgcaccctcagatttagaatcgatttttgaagcctttatgcaaacagaaaagggccgcaatgctcaaggtacaggcttaggtttatctattagtcgtcagtttgcccggttgatgggaggtaacattacagtcaacagcactttaaatcaggggtcaacctttacctgtgaagtatttttacatttagtagatgcagtcgatttggcggaaccagaagcaactcgtcatgtaattgctttggaaccaggacaacccacttaccgaattctgatagtagaagatgttttagaaaatcggcaattgctagtcaaattgctagagtcagtaggttttgaagtttgcgcggtggaaaatggcgcagaagcgatcgccatgtggcaagaatggcatccccacctaatttggatggatattcaaatgcctgtgatggatggctacacagccacacaacaaatccgcgccacagcaggcaaagaagatgtaattattattgctctcactgcctatgcctttgaacaagaccgcattgctagtctgcaagcaggttgcaacgaccatcttgccaagccttttacagaaaccttgctgtttgagaagatggcacagcacttggggctacgctatgtatacagcgaagttatcacacccgacagcaatatagtaacttcaccgaaaaaacccctcaccactcaagacttacaggtaatgcccagcgagtggattgaccaagtgcatgaagccgctctggatctcaatgatgccagactctatgaactgattgccgaaattcctaccgagcaaaaaaccttagctgatagctttaaatacctggtcgatcatctccaactagaagaaattattaacctgagcgatttaaatttataaattttattaaatgaaattcagaaactgactacgcaaatcttcaactgtctactgcattaacttgcaatcaaaaatttaaaatttattacccagttttgacatcagatactatgcctaaattacttaaaccagcatcacaaaccaagattctcattattgatgacaaactggataatattcgcttgttagccaaaattttagaggctcatagttatattgtccggaaagctctcagtggcaaaatagtattacaatctgtgcagcgagagccaccagatctaattttgctcgatattaatatgccggatctcaacggctatgaagtgtgtctacatttgagaagtttagaagcaaccagaactactccgattatttttatcagtgcccttgataatatcaatagtaaagttctagcctttgaattaggtgggcaggactacattacaaaaccatttcatgagttagaagtcttagccagaattaaaaatcaattactgattcagcagcaaaagcaactcctaattgagcaaaatcaacaattagagcaggaaattcaacaacgtcaactcgctgaagctgaaattcagcgactcaatcttgaattggaacaacaagtaaaacttcgcactttagaattgcagcaatccttaaactttgaagccacactcaaacgcatttctgataaagtccgcgattctcttgaccaaaaccaaattttgcaagttgctgtcaaagaactagctctagccttagagttgaaatgctgcgatgctagcctttatacccgcgatcaccaatccgcaattattcgctatcaatatgtagcatcaggagaacctgtaactcagggacagatgctatatatgacagacgcaccagaaatttatcatcagttggaacaacaaaaatcttatttcagcttttgtcaaattcagccaataccaattcgcaatcattccgcgaccttagcctgtcccatttttgacgatcaagttgcagaaacagggattttaggtgacttgtggttatttaaagacactgattctactttcactgaaatggaaattaatttggtgcaacaagtcgccaaccaatgtgctgtagccctgcgtcaagctgatctttatcaagccgcccaagcccaagtcaaagaactacaacgccttaaccaacttaaagatgattttctctgcaccatctcccatgaattgcgtacacccgttgctagtatcaaaatgggcattgagctattgaaaaccctcagccagcaagcggatgagttaaccaaggaagtgcgatcgcatgggcaggatcgtcaagtcatcgaatgtctgagtgttttgcaacaacagtgcgatcgggaattggaattaattgaagacttattaagcttgcaatatttagaagcgggagtctacccccaacaactcactcaaattcatcttagagattggattctgcacattattgagccatttcaaatccaaatccaaaatcagcagcaaatcttagaaattaatctagcgccagacttacccaccctcaaccttgatgctttcagcctcagccgcattcttacagaactgctgaataatgcccataaatacactcccgcaggtgaaacaataacgctagcagctagcgttattcatcacaacacagcaacaccacaaccccaaccaatactgcaaataattgtggctaacacaggagtagaaattgctcccgaagaaatcccccgcatctttgataagttctaccgcattcccaatcacgacccttggaagcatagcggtactggcttagggctagcattagtgaaaaaactagttgcacaaatgaatgggacgataattgctgaaagcgctaacaatcgcactcagttccttctgcaatttcccattctctccagacagtgatacaagacaatgatttcaataacaactttattgactggagattttggcatggattttttcccattgctcaatttgatgaagcagttctaatctgcgatcgccttctaccctaccgactccagcaaacaaaccctgaccattcaactggtcgcggtagatagaaatcatttcagtcagcacttttttattacttgcatttcctccccagtgaaagaatttgcatctaagcgaataattcgtctagctattctctctacaagttccgatctactgatctcaaaattagaggcgatctcatccaatccattaataccagtaggagtaagagctaaatttacccttttcttcacctcgtcatacaactctggtacgtctttttgtcctttttgacctttcttgcccattactactgagttattaaacatcctcaatcatagtaaacactaaggggcagagattttattgcctgtgtaaaccatttagtaattgtgtagtacctaaatcaacgctaatatagggattgtgtaatacctgagatattgcattataagcaattaatctggaaatttagttgggttgatatagaagggtctgtaaggcaatcaccataaactataatcactctcaaatttgcataagttcacatttcagctttcaacataagaaataatctatgcttggctttttcccatctccttatccagatgaaattttatacagtatattggcgcggtatcacattagaagcggtaacacaagcccaaaaataaccctccgagaactatttaattcggaaaataccatagctactgttgacctaccttctaacctgaattctttgatgcaaaacatcaaattagtctcaaattatcaggtagaagacttcatatacaaacatacattattccctttttataatgttttcttacctccgaagagagctagccaagtgattgattccatgaaagcagagttcggaggagatattcataccagagccggaatcatggctagttctataaagatgctaaggtctctccggttttgtccacaatgtttgcaagaagatttacaaaaatatggagaagcatactggcatcgaatacatcaaatacctggagttttagtctgtccatttcattgcataactgttcaagatagtataatttccacacaaggcttaaacaggcatgaatactatgctgcaagttcagaaaattgccctatctcatcaatagaaacttatagtgaggaaactttaaataagttgctgttgctagctcaagatagctggtacttaattaatagtaaatttgtatctagagaacttgaatggttccagaaaaaatatatagcattattgatttcaaaaggtttttctactgcatcagggagagtaaaccagaagaaattgctagataatttcttgtttttttatgggcatgaaattttgacagcagttaattcaatggtaagttacgaaaagtcgcaaaattggctattcagtattttcagaaaacataggaaatcatttcatcctattcgccatttactcacaattagatttttatcaaattccctggatgagtttttcagcaatcattatgagtataaacctttcggtgatgctccctggctttgcctgaatgctgccacagaacattatcttcaggcagtggtcaatcatttggttattagccactgtttggataataaaaagccattaggtactttttcctgttcctgtggcatggtttactgccgaactggcccagatgaaacagaggaagataaattgcgaatcggcaaagttataaaatttggttcagtatgggaacaaaagctcaaagaattggtagaaatacaaaagttaggtttacggaagacggcaagacagctaaatgttgatcctagaactgtaatccgttatacttcgctgttgggactcaaaactcattggaaatctattaaggaagctaaaccattagataaagaagttttagaattaaatcctgtaaattattttaatagtataaacattaaatacagagaagcatggaaagatttacaataccaatatccagaagcatcaaaaactgctttgaggagattggctaaaggaacctatgcttggctatatagacatgataaagagtggctccaccaaaactcaccagatttcaaagtttctgtccccagtttaggaaaagttgactgggtaaaaagagataagcaagttctcgaagaagtaaaaaaagcagtattatcacttctaagtgctgagaagcctgtgagaataactattggcagaataggaagaactattaatttactagcactattagaaaaacatttgtcagaaatgccattgacaaaagcttacttagactcagtcatagaaactgtcgaggattttcagattcggcgtattcaatgggcaattcagcagcttgataatcacggagaagaaattcttgcttggaaggtgattagagttgcgggtttaggtgaaaactgctcggaaatagtacaagcatatctggaaaaagaactttatatacgaatgtattaaataactggaaatttttacctatatttcttttaattaaaagctgaaaacaaaaaaaagacgtgaattgaaccacgcctctaggtgatggaaaataattaataccagcgattaagccacatccgctaccagcaaaccgttaacagcaatgatgaatagctgtgctaactcaggagtatcaaagcaaggtctttcatctctgttacagggctgtgctacccatttaccctcaaggttttgataaaaagtcccaagcagatgagagctgttccaaacgcgataaagttctccaagctcatctggtactgagtcaatttcaatttcaggagctatggtttcagcaagctggtcaatatattcctcaaactctaattgaaccgaggtttggttatcgaattcatcttgtacaatcatcatgagtaacctttttgatggggttcaacaaagggcgatcgcatttctcttggctgagggcggtcgcctttttgatttcatcaatatattagctactttagtagctaaaaacaattaatgtatttaaaactttaacttgtaacttcaactatactgaggaaatcgcttatagatattcctagtgcagtacaaatagcctctaatacttttatagaaacactttcagactcaccatactctaatttttttaagttttgatgagagcattcaccgcctctagctgcgatttcattggctaatgattgacgggactttttgccacgcaactgctttaaaactgctcctctatccttgctccaggtaactgatacaacatctgcaacataaatgtacactctagtttttttctcactgttattgctcatataatagctacagcagtaaacaaaatataaaattctgagctactacagtttacaaactatgaggatttaacgtaaaagtgagtttcctttaaatgaattagcgcttctgctccagaactggtttagcttctacagctttaaaaagctaccataagcaagtactcaagacctgaacattttttgttgttgtggataaaaatgtattactgaaacagtgcgatcgcaatgtcaagattttgatctgcctaccatttattctcaaagacgacagactgaactaaatagcaagcttgtagaggcgttacagattttatcgctctttgacagctagatgaaagataagttcaagataactgtaactgacgattgcagttgcaaaagaatgcgatcgcataacatttctcacagcaggacttctaaacttaatcttcaacttatttaagtatcccaaatctttatcaggaaagggtttacaaaattgttcaaccgttttattcgatgtttttgctgacaagtaagtatactacagagagtgtgcttaaattgttcaaccgttttattatgtaaatcacgatagattaagcatttgaggctcaaatattgttcaatcaaattatttgtctacacttgttgtggaaacataataaagttatacaatttctcct

SEQ ID NO: 882 - DNA, 28603 bp, Nostoc sp.
  source 1..28603: mol_type = other DNA
tctattaatagaggtagtagcgtttatgtggaggaataattcggttgaacaattaataattcggctaaacaattaataattcggttaaacaataaccctttacagagtacgcttgtattaagaagatatgcgatcgctctcaggggttatttttatggttagaggcagaggagaatggacgcaagccaaatttgagcgctatagaaaagaaggtcgtgggcgggggagtggtaaagactataagccctggattacaatccaagattttccctcgaaaggtcggtcgtctaggactcctggctggaaaagcaaccgagtacatcatttcttgtcagaccaagaaaaacgattattttatttatttgagtggtcagatgtcgtcacagatacaagagagcaattccctctagacgaccttgacctagcgatgagtattgctacggagatgggtataaagtatcctgtagacctacaaagtggtactccttatgtcttaacaactgatttcatgcttacagtaaatcagaatggaaagcaggttcagattgcccgaacagttaagcaatcaacagagctagagaaaaagcgagtaattgaaaaattggaattagagaggcggtactacttagcaaaaagcatagactggggaattgttacagaaaatgaaattccaaggctattagcggaaaatgttgagtggattcattctgcctataatttagaagcaaattctgaaatggatattccccaattgcatgagctaggaactattttaaaatccaagcttcaggaacacgatacggcaataaatagagtaactaccgctctagataaagaaatgaatatcaagtctggtacatcactttacatgtttaagcatttaattgccgcaaaaaaaatcattataaatatgttggagacaaaaatatctgcttgtccttccagcaaagttatcgaaaaaattatattttagaaatattatttgatacgtaagatgcatgaagatttatttatcaatgaccttatcgagtgggaatcagatggaaatagtcaactgatcgaaagaattatttggatcgacgaaggttatgttattgcctttgttcttgatattaattctaaaaaaggtttgccagaaccgaagaaagtatctgaaattttagaagctatgtctgaaggtcttgcatttaagcagaaacaagacccttgggcaagaataattcgtgaggaaaatttaacagatagagataaagagtatagagataaagcttgggaaataatttcatctttagttgtccaggaaccttcaatatattataggaatattcgaggttctctggtaagacaagttattaaaagctataacgaaggaagagaaaaagataaattagtagaaagaactgtttatggatacatgagacgattttggcaaaggggaaaaacaaaaaatgctttgatccctgattttatcaattcatcaggtaagggtaaaattagaggagattcaaataaaaagagaggaagacctaaaaaatattcatacgacccagaaattggtgaaggggtcaatgtcacggaagaggataggagaatttttagaatagctattagcagattttacaataatccaaaggaaaactatttcacaactgcctacgagttgatggtaaaggagttttataaagaaggagtcagatatgacgagaatggtgttagaaaatctattctaactccgactgagaaaatacctacaattacccaattcaaatattggtatcaaattgagcaatatgatgtaacaaaaactttgatatctcgaataggagcgaagaaatttgctctagaaaatagagctattttgggaacctctaaaatggaaactattggccccggttctcgatatcaaattgatgctacagtcggagatgtatatttagtttctaaatacaatcgtaactggataattggtagaccagttatatacgtaattattgatgtttttagtcgaatgataacgggtttttatatcggtttagaggggccgtcttggataggagcaatgatggctttaactaatgtagccgcagataaagtcatgctttgtcaggaatataacattgatattgctgaagaacaatggtcttgtaatcaaatgccagatgcaattttaggagacagaggagaattggcaggaatggctgtagagccattaatccctaatctttatgttcgtatcgaaaatgcagcttcctaccgagcagattggaagggtttagtcgaaaggcactttcgtactattcatgagtatgtaaagcctttcttacctggttatgtggatacagattttagacaaagaggcgcaagagattatcgactggatagtaaactcgatatagaccaatttgctgaaattattattcgtttaattattttccacaataataaacctcttaatgaatatgagagggatgaagcgatgattgctgatgatgtacctcctatccctagagagttatgggagtggggtatcgctaatcgctctggtagacttagaagctttcctgaagatattgtcaaattaaacctaatgccaactgaaaaagccaccatcactgctaaaggcattaaactcagaggcaaggatatgtactatagctgtgatcaagcagaaaaggaacaatggtttgaaaaagctagaagcaatatgctctctaaatcagagaaatcgttaatagtttcttatgatattaggaaccctaattttatttacctcccattagaggatggtagaaattttgaaaagtgttttcttatcgacccagaaggtagatacattaacaaaaacttttatgatattgagtatatgcttgcttacgaagaattacaacagcagaaaactcaaggcaaaacactacaggaaaaagttgatttaatagcagatatagaacatatagttagtaaagcagaaaacatgactgaggcggctcaggatgaaccattaagtaagagcaaaaaagttgctggtattagagaaaatagggcttttgaaaaggctaaacgacgtgaaaatgagggatttgagctagcaaaaacagaaactccaactagcacggaagctgtagagacgaacaatgaaagcttaaaaccacccaaatcgttgcaacctaatcatcttgatattcttaagcagaaacgactggagcgtaaacgtggacggaaagaatgagcgtgaatgggttgaaattccaaatggtgattgggctgctattgctaaatatagtgaccataagttacctgaatataatattaatcccctagttcaggcattacctcctatcctttcaagagatgagtttgttgaaagagtgacagaagtgcctgattatgattctgtagagacggagctagagccacagtatagatttcattgcattgaacgattatcgagatattttgatccacagaataagacaatcgagctacagaaggtaattgctgtattaattatgcaaggctatatagctcgaaatattttgaagccagaatatacacgtaggtcaaggcaaatctatgatgctataaaagatggcggcggtaaaacattggaaaattatgtttatgttcctacctctgcatcagggctgacactgattggcccatcaggaatgggcaagtcaactaatctgctgaatattttgtctttatacccgcaggtcattcttcatccagaatatactactttccaaattgtttggctgaaagttgattgtcctcgctctttgaaaggtttgtgtactgatatttttcttgctgttgacaggcttcttggaactagctacttcaagaaatttggttctagaggtaattcagaagactatatgttagctcaagttgcccaaattgctcatacccatcacttaggagttttggttatagatgaaatgcaaaatttggtgaacgcaagaaggaatagagatgatttattaaattttttagtcaaaatggataacactatcggagttccagtaattcgagtgggaacaaacgaggcttttccaattttacaaggtaattttcggaatgctagaagaggaacagggcaaggaagtgtcatttgggagagaatgcttcaagatgatgactgggatttcttcctcacgggaatatgggagtatcagtggacaaaaactcctgttgatttttctgatgaaattaacgaagctttctactacgagtgtcaaggaattattgatattgctatcaagctctataaaatgattcaatggagggcaatttcgctcggaggtgatgagaaaattactgttgacttaattcaccaatcagcgaaagacggactatatttagtcaaaccaatgctggatgctataaggtcaggagatcaggattggatgattaaatacaaagatattgctcccattaatgctatagaatacaaaaacaagtgtttatctgagcttgaatctagggacttagaagaagttcgcagattagcacgtaagcagcaaaacaggggaaatcaatcagtaaagctacgtcatattattgttgaacttgtgaagttagatgtagagccttctgtagctaaagagtgtgctgaaaaagttcttgaaattaatgaagataatgcagatattccttcgttgctaaaagaagcatatatttatgctttgcaaggcgagccagttaagaaaggcactgcaaagacgaacatacgcaaaacaaagccaaaatatcagagtaatgatattcgccaaattgtcgagaatgccaaaaataaaaaaaatcctgcttatcaagacttaaaagcagcagatataattaaaaatccacttcaagactttatcaatattgagtaggcttatgctcagtttttttccacaactttatcctgatgagcttttgtatagtggtttagctcgatatcatattaggagtggtaacacaagttttaggcaaacagaaatagagctatttggatattattctcaacaaatatgtagagttattttacctagtaacttaaattatctagttaataacttacccttgcgttcaaagcagactgtagaaaatataattcaaaatcatagtttataccctttctatgcgacttttctaattccacaggaagcttgggtagtaagagaatcaatgaagaaaaaactaaatggctctatcttagagatggctaaaatagcttttaattctaccgatagagcaaaaaagtttctcaagttttgtcctatatgtatggaagaagatacgcaaaaatttggagaaggttactggcatcggtttcaccaaattcctggtgtaatggtttgctctgttcataattcagctctatatgatagctcagttattgtcgaaacgcgaaacacacactatcatgctgcaagtccagataattgtattctcaatacgaacacaagaaattatacagaaggaactttgcgaaacttaatagtgttagccagggaagttgagtggctaattagtaataatatggattttaaaggtttagcttggcttcgcagccaatataagcattatttagttaataaaaaattaatcacactttttccaggtaggaaatttatatttaaagagaaagatttttctaaatctatctttaacttttatggacaaaacttttttgaaactattaatcaaaattgtattaaaaatcccgataaatatttttctaattgcctgctagcctgtgatataaacccagtcattgaccgaatcatacatattctaattataaattttctagctaactctctagaaaatttttttaggtaaatattagttggcagttttatagttaaaagcatttttattacaaaatattattattgttaatttcgcttaataaaaacttatatataaaactatcgggtattctagggaaataagaataagtagcctaagattttgtctgtttggttcaacaagatatggtgaaagagatgagtagctattttagcttacctacccaaacccccataacagaaactttaacccaaacctacccaaaagaaactttaacgcctaagttaccctgggttgaattacgttttagcatcattggtcagactatacctgtggatcacggttatggcttgtattctgcgatcgctcattttcaatcccaagttcacgacatagatacattgggtattcacactattgcaggtattcccagcgaggatggtcaaattcatctgactgataattccaggcttcacattcgcctacctgtggacaaaatcagtctaatctatccgttagcagggaagtccctgaaaattggtaagcatacaattcgcttggggattcctgaaatttatttgcttgagccagctgagagattgcgatcgcgtatagtgattatccagggttatcaaaaaccagaatcatttttagcagcagcacagcgtcagttagaacaactgggtatccagggaaaagcctttattaccaaaaatactgatggtagcccaaaacgtagaagtatcaaaatcaagcgctttacggttgtgggttttgggttagaaatcattaatctcagcaatgaagattcactaacattgctgagatatgggattgggggaaagcgcaagatgggctgtggcgtttttgtgcctgtgaagataaagggaaatgcaagttaaagctggttttgactactacccaatataagtttgagagtatttcccagaaataaataagatgtccgtagtagctagtgttgtcaaccccaaaattcagttaaatttgggcgatccaagcataacttggatacatcgtgttggcatagcaggactctggatgacgcttaagcaactagaaaaactatacccaatacctgcggaacgacctggtaatttaacttggttgctgactcctcgtagtattagccttgaatggcaagggcaggatttcgtagttttagactggctgctaaagcaatcttttcagattaatgaagaaggtctaatttcgctgacaggcttaaatacgcattcaatcaatattgaaacccaaattaatattcatttgggaataacaggaacgtttctccaacataaccaggtttttaaatttgacggcggtaaatcctggtcattaatagttgatggtatagaaatcgatgtcgagtataagaaagcagtttcctatgctcatcaacattttgctaaacaactctgtgataaacaaggtcaattattaggacaatcaattggtgtagcagggtggctatatccaggatctgtagttcgtcatgtcgcttttacaaaagaaactaggtttgaagagaaaccacaattggcttttgctcttttatatgctcttgttgcttgccactattttgttttgcgatcgcataccaaactggaacagacacaatatgccctagttatacctgaagtggttgacttagaaatttatgcccaggaatactggaatttgggaaacttagattacaaggatttccatgtatctagcttgggagatgctgcattaaaattccttacttacgaaacaattgtagaattggctatacccgatcaagaaaaacgatgccaggtcatgttgtttggaacggtgatttggtcaaagcagcaaaaaactcgcatagaaatagcagtggtagaagcgactgaaataatggattttatctataagcttagtcggatttcttttccagagtaccaaattattgagtataaaaataaaaattttatcattagcaatatgtttaggggaacaattgccgataacttagtaaagggcttcccttggtgggctaatttatatacaatctttaaaaataaaaatttatttaaatttattactaatgatggagtttataagatgattcaaaacgctgaatggaatctagaaagtcaaaaactctttattaaagcttgtcatgaggcattgaagaaaatatacgctaaaatttatggacgaacgaatgaaggtcaatatgctcaaattgagcgagagaatatacgtattttatcgcaactaggacgttgtacaaatgctgaaaattttcggaaatttattgcagagttttggggaagagcaggtcaactttccattttagaaaaacattgggaagaattactgccattaacttctgggataatggattggaaagttgccagagatttaacttttattgctcttgctagttatccaaaaagcaatatggttgagaaacaaatattggaaatctctgattctaatagtgaataattacacattttttgcttaataaaacacaaaacatgaatttaataggcaattttaaatgtttcatttattcggcaatattttgactagctatggaaccgcagctaataatcgtggggaaaatgaaggtaatataactcccttgcaaaaattgaattggaaaggtgaagttcatactattgtttcatctgaggcgattcgttgggcgttacggtactactggcaaaatgttggctatccggtgaatcgacgttgggatgagaacgctcaaccagtagcggatcatctttggcaagacctcaactttgatgatattcgcttcattgatgatgatgttttgggatttatgcaggctgaagcagcaaaagtggaagcgtcagatgagtctggaggcgatgccgaggaagcatctcaagatgagaacaaaaaaagttctaaaggtaaggataagcaaacttctccacgtaagggcaagcaaaagcctaaaggaaaaataactgctagacgaggtgtattagaagttactcgtgcagtatcaatgataccttttatgggagacattacctttaatgctgttagtggagtaaaaagacgaaattctctttatgccacagagattcatgctactcgttatcaatatggttttgcattgacacctgatagcctcaaagataaatctcgcatccatgctgttctagatggtttgatttcgattggtgaagtggcgggaaatcatgcccgttttttgtatgatttctcccctgaaagcattgtactgcggtggacacatgatttttctcctcgttttctatattgctttgagcaagacgaactgggaaatatgtcaatatcaaacttagtgcgacaggtagaagtaggagatattgatcccaaagaattatggattggaggcttaatttctcatggcttagaagatttgggagcaaatgtgtttcctggagtgaagtcggcagtcaaagcattaaaacaggtcattgctgaagatttgcagttgtcatcggggagcgattaacatgacgacagttgctttgaaagttgaagtacctattgcttgttttcgccaatcccgtgctagagaatacgctgaaacgtatccagtgccaccaccttctacagtgtacgggatgttactttctctgattggtgagacagatcgttataagcattgtggaactcaattagcgatcgcgctcttgtctaaaccagaaaaatctattgtaattcggacttttcgtaggtttaaaacgaaagatatccaccaccctaagaatgctaaacctgattaccaagagttgctaacgaacgttgagtttgtagtttgggtgaaaacagacaaagcaaagcctactttagcagaacttttgcagcaggcatttgcgaacccagcttctattaatcgatttggtggactgtgtttaggtgaaagtcgggatctagtcaatactgttacccttttacctgagaagtatcatagtgagtctttgtggtggttagttacagatgaagatggttcgctaaccttaccctattgggttgaccatgttgggtctaagagaacacgctggcagtgttatgagcttcaagagtcccaagtatggcaaccacctgatttatcgtggactacgattcaaactagttgaaaaatgagggtatttagatttttacaaggatatctacttgttgagccgacataaagagataaaaagtcggtattctttactgaatcagcaattcagcgttttcattatgattaaggatgcttgcaattcctcagaaagttccaacaataagccttctgggtgttgttaagctagcctagcccattaaattttgcaaatttagtgcctcctaatgataggtgcttgtaagattatgtagaagacctgatggattaatatgtttagccatcgctgttctttaacattagatgtcgtcagacgttgagcagaaacatggaatccattggttggctgttctcgcatcagttctttaacattagatgtcgtcagacgttgagcagaaatcgactccagcgtaagagcgctccctacgtaagttctttaatattagatgtcgtcagacgttaagcaagattttcctgctcgttgccatagcttaagtaagtgggcacaataaaaccacactgtgtaaagaaaagtaaagaaggctcaaactctttttccccctgctccctgccccctgctccctgccttatcccaacgataattatttacgcctacctacttatacttcaaaaacaatttttgtgcggatttgttcccattgctcaatctgcttttgtagttgcaatttacgatcgccctcaactgcaccaagaccagtaaacaaaccctgatcgttcaactgatcgctgtaaatagcaatcaattcagtcagtgcttttttatagcttccatctcctcctcagtgaaggaatttacatctaggcaaatcagtcgtctgccaattctctccacaagctccgacctgctgatatcaaaattggaggcgatcgcatctaatccttcaataccagtgggagtaagggctaggttaacccttttcttcacctcgtcgtacatctctggtacgtctttttgtcctttctgccctttctttcccattagtacccagctattacacacctcctaaatcatagtcaacaggaaggactacgggtagattctataaattgctcaaagatatttagttattgcgtaatacctgagttattgataatataggcgttgtgtaatacctaaaatatttatgatagagggcaaaaatcctcataattttgtttgctgtggagagaaaggtgtggaaggcgatcgctacaaacttgaaacactttggaatttacaaaaatattcttttcaggtttcaacatgacaaagaatctatgcttggcttttttccagccccttatccagatgaaattttatacagtattttggctcgttaccacattaggagtggtaacactagtccaaaaataactctaagggagctatttaattctcaagatgtaatagctactgttgacttaccttctaaccttaattcgttgattgagaatctacaatttatctcgaattatcaagtagaagatttgatatataaatataccctctatcctttctacagtgtttttctgccaccgaaaagagctagtcaggtgatggagtctatgaaagcagatttcggaggagatattcataccagaaccggaattatggcgagttcgttaaagatgcagaggtatctgcgattttgcccaaaatgtttggaagaagatttgcaaaactatggggagtcctactggcatagactacatcaaacaccaggggttctggtttgcccagttcatggtgtgactttgcaagatagcacaattcccatacaaggttttaacaggcatgaataccatgctgcaagccaagaaaactgtcctgttgtaccgatacaacaggcttacagtcaagagactttaaagaaattgcgactgctggctcaagatatttcatggttgataactagtaatcttttctctagagaactagagtggtttcaaagaaaatatatagctttattaactgaaaaagattttgcaacggcaaccgggcgagtaaaccagaagagactactagataatttcttgttcttttatggtgctgaagtgcttgaggctgttaactcaatggtgaattacgaaaatgagcaaaactggctattcagcattgttaggaagcatagaaagtcatttcatcccatcagacatctactcataattagatttctgacgaattctatcgaggaatttttcaacacggattaccagtacaaaccttttggtgaagggccttggctgtgtctaaatgctgcggtagaccattatcttaagccagtaataactaatcttgttgtcactcactgtttggataataaaaagccgttaggtactttttcttgttcctgtgggatggtttattgcaggactggccctgatgaaactgatgaagataagcagcgaattggtaaagtcaaaacatacggtcaattctgggagcaaaagctaaaagaactggtggaaatccaaaaattaggtctacgagagacagcaaaacaactcaaggtcgattccagaacagtaaaacgttatactgccatacttaagctaaaaactttttggaaatcttcagaggaaaatcagctagtagactcacaggaagttttagactcaaatctaaatttagccagtgatgacaaaatcaaatacagggaagtttggaacgctttacaacagcagtacccagaagcctcaaaaactactttgaggggattaggtaagggaacctatatttggctatacagaaacgacaaagagtggctcaacaaaaattcgccttctttaaaagtgcctctcccttgcgtcggtaaagttgactggacagaaagggacaagcaagttctcgaaaaggtaaaaactgctgtacgaacacttctgagtgcagaaaaacccgcaagaatcactatttgtaggatagggaaaagtattagcttactggcactactcgaaaaacatttggcagaaatgccactgactaaggtttatttagaatcagtcacagaaactgtagaggattttcagattcggcgtattaagtgggcaattaagcggcttgatgattgcggagaagaaattcagccttggaaggtgattagactggctgcgctacgagaaaattgctctgagagagtacaagcagctctagaaagtgagctttataagcaaccgaattaagttaataacactttctagatcatagttctgttgatcaaaagcttcaaacaaaaaagagacgtgttaaatccacgtctctaagtgatgagaaaaatattgagttctaagctacatccgcgaccagtaagccgttgacagcaataatcaaaagcagcgctgaatcagaagtgtcacagcaatgtcttttatcgctattacagggttgcgctatccatttgccttcaagattctggtaaaaagttcccagaagttgggaaccgttccaaactcgatacagttctcccaaatcatctggcactgagtcaatttcaatttctggcgctactgcgtcagctaactggtcaacatattcctcaaactctgcttgagccgaggcttggttgtcaaattcatcttgtacaatcatctgagtaacctcattgatggggtttaacaaaaggcgatcgcaatctttggacggagggcgatcgcctttttgctttcatcaatatattagttactttagtagctaaaaatcaataagtgtatctaaaactttaatttgtcacttcgaccgtgcttaaaaactcgcttaccgatatttgtaatgcagtacaaatagattctaatacttttaaagaaacgctttcagactcaccatattctaattttttcaagttttgatgggagcattcgccacctctggcagcaatttcatcagctagtttctgacgcgattttttaccgcgcaatcgctttaaaactccacctctatcttggttccaaactacagatacaacatctgcaatataaatatatgtttttgtttctttttcacccttattgcccatataatagctacagcagtaaacaagtaataaaattttgagctactatagtttacaaattattaggatttaggcatctcaagtgagcaaagttgcacccaacctttaggataagagcgctattatccaagacgatacacaatgcaggttttgccaacacaatgcgtcatagccaatattatgagtaattgtataatccttaaagaggtagcaaacaagtatatattaggctgattgttaatttgctaaaagtatcagttttcaaaaataactgaacatttagctgtctaagtataaatacgagctaaattaattagtatattctcaaattaataaattagatgcctacctgggttatgacacagtataaacacggaagctaagtcaagtaaggatttaaagcagaaatatatacaaaagtatttacggcataatgtggcggacaagagtatatagaaatacaatgacttgaatatgtttttctactcttatttgtcataagtgtatgcctgatggcacaaactctagtaatacgcacggatattcctatcataacccttcgccttcaggtacttgtgctggctttgggggaagtttcaacatggtggcgaactcaatatctttcttctgctggactaaaatttttagaaagaatttatccacgcacagcttttgccgcagctatccatgctgctggtacggcagcacgtcctgttcacgatgctagtactggcagtaaccaaatctaccatctgtttcgccttcctatttctatagaacgggaagttcaactcctactagcaaagacgcaaggagcaagtttggcgttagaagtcaaacctgcacttggggataaagacaagttgatgacaatgttagattcccttgcaacagaaaagtctaaggtagcggttggtgcattacgtttgggaagcagtgcagacgcataccaactggcaacctacaaacggatggcaggagcatatctaagaggttttcaaacaggcgatcgcatctttccctacatggaggcagaccaggagtgattgctatgacatcgggtgacgcagtgcaaaagtcacctcgttacagtattgcgattgtctgtaagggaactgcaatggtgaacgagactcgccatttaattcaacaatggcatcctacagaaaatgtagatacatttgttagacgcgttcaagctgaggatctgctgggacggcaaactgcccagcgagcaaaggatattgcccgaaaagtttttgcagcacgctttttactaccaaataacaaacctgctcgactccttaaacaaattgttgaggctggtcttccccataaaactttcgtagaaatattatttttatttgcgtgtcgtgctgataatttattgtatgattttacgctaaatatttactgggcagcagtagcgcaaagacgaaagaaaattttcacgcaagacgttttagacttcttcgagtcagctgctgttgatgggcgaattctctctccttggtctgagggaacacaggtgcggacagccaggggattgttagcaacgttgcgcgatgttggctttttacgcaacgttagtcatggtaaatcagagcgagaaattgttccctactacatatctgatgaaggtgtagcttgccttgcacgatatctccatgaatcaggaatttctaactcagctttgtgtgaacaccgagactggagtctttttggtctaaatcgtgaacaagtttgcgatcgcctagatcaacttggagaacatcgtggattaatcatacaaaaagctgggtcagtagtcagcatcacttggaaaatcaactttatggaggaacttattaatcctacattccgcacttcaattagtagtatcagtaaactacgttgagagaaaatctaaaattataatttggacacccaagtaactataaagaaaaataaattatgcactataaagatacccagctatgattttttgtgtaaaaagctagttagacaagaatatttagtttcaattttatttaattattagaacagcagtatgtccaataattaatcaaatatttttaagctaaagaataatatttttgacaagaatcaggaaggaactgcaagatttgacaacgttcttctgttaagttaagaattagcgaaattccttgtgtaatcagaatgtgaactccttgaaaacattgaaatatccagcgcaatgtaggacgttcagttggtttattcaattgatttttaactgtagctttttcggtttttaaagagcttcttagttgtctttgtcctaaattataaaccaaaagacacaatcccattaacatcatcattgtctctactcgttcgggatttttcacaaaaagactatcggcaaaaaataaaggatctttaataaatctaaatcctcgttctgaggattgctgttgtttatatattctcagtatttctgaggctgataactctgttgtatccaaaatattagttgctaaaataaatctcccacaagaattttgattttccgtaattaattcctgattttctatcaattcacctacaactttataaattacttttttatctttaatttccttctcaagaattttgacttccgagattttatgatattttagttgggactcaagttctttaattttagatatcgctaaagatggctgttcaaattcatatgcagctaacttagctatttgttttccagtttttaggaattctgacttgattttctgtgttaatttcttcaggtctgctttttttctgtcttcactttctactaataaccatctttgttctattcccccataagtcattttttcttcttgatagctatatccttttacttcacttttatttagttctgcactcaagaatgcttttaccaagtttttagcttttttaatggataatggtactcgacttatccattttatgttctccattaatttcaaattattctcgctatataaagcactatcagctaccatgatgctttcaaaatctatttgtttagaatactctactaaaattttgccaaaaacagctttatctgattcatttcccgaccctcccctaaaaaacaatggaatatctccatcactacttactattaaatctaagatacattgctttaaatctggtctgtggtcacgagaatatccctgtgtgattacaatcggattatatgaaattatttctaattctttttcctgattatctaggcgattattgtattctccatgcaaatgcaaggaagttgaatctaagtgagaatatttagtcgatattttatattttttgactacttctaaggcaattattaaaaataatttagtcagtccatatctgtatatcttatccataactcttcccaatttatcatcgtttaaatcttctggtttaattccttctcctaataaatgttctatagctttatcttcaaaaaattgagaaaataaatataatggttttgagacaaaaccaagcccattaagaatgattgctttgactacttctcctgtattgattttttctctcttatcaattaaaaatatatcattgattttttctacgattcctatatcatcaattattcctgctactattcccaagtgatccaagtttttactctcaaactcttctttttggtaatccatattttttgttcaattttattttatgaaaactaattatcatttattatctcaccttttttcttctgcatttagtgtcaataccttactaatttcgagcagttagcaagatttgcaatactgtctatattaattactaaataaattaagtatttttatttaaggcttatcgaaaactttcatatcagtatgtatattacaaaatgaagtgcggaatgtgggctagatacttggctagcttccataagaggaaaactactagaaattttgaatttacgtaagcgtatacgcattaagggataaacatgagctttgatcgagaaaccctcaacgccttggccagaatggttgcagcttgtcgccgacggctgacggaagatgtagaaaatcaacttcagcagacttttgggttgtatctagatggcacaattctgccgttatcccaattgacgcatttgacagaggagcaaaaggttgcagcgcaagcattacgtgaactgctaaaccacttcaaagccagcgatccacaaaaaagctatcaatctgcttacaatcgcacaattctggaaatctcctttaccatcctcaatcgtttggcagctttgcgcttgtgtgaggagcggaatttagtaattgaatgcgtccgcaaaggaatggaatctgacgggtttcgcttgtttgaaagacttgctaatggcagtttggggagtcgttacgaaacgtatcgggtgtttgtcgagtcgatgtttgacgagttggcggtggatttgggagtactatttgaccgcactactccccagtcaacgatttttccgagcgatcgcgtcctaacagatgtcttcgacttgctcaatgatgccacactgcgacccatctggactgaagatgaaacaataggctggatttaccaatacttcaacccacctgaagaacggcgagcaatgcgggaagcatcccaagcgcctcgtaacagtcgggaattagctgtccgcaaccagttttttaccccacgttatgtagtcgagtttcttacagaaaatacccttggtcgcctttggtatgagatgcgccaaggagacactcgcctcaaagatgaatgccagtattttgtccaaaattctgagcaattctcagttagaaatcgtaaagatcctcgtgatatcaaagggctagatccggcaagtggtagcggtcattttctactttacgcttatgacttatttgaagtcatttatcaggaagcatgggacgatgaaaattcaccaccctcagaagttacgggtagaaaactgcaagaagattacccagctttagaagaattgaacagacagttacctacattaattcttaagtacaatttgcatggcatagatattgatgcccgtgcttgtcaaattgccgctcttgctttgtggctacgcgctcaacgttcttaccaatctataaagattaaactagctgaacgtccacctatacaaaaaatcaatattgtttgcgctgaacccatgcctggggaagaagaattactcgtagaatttatcactgaattgaatcagaaacgcccgccaattattggtgaattggtgagaaaagtttttgaaaagatgaatttggcaggggaaactggagcattactcaaaattgaagaagaaattcgtgatgaaatcacgctagctaaaacccaatggctatctgaatctagccccgaacaacctaccctgttttcattacaagaatattaaaatattaaccaattaagtatatttaatttagctggaattactgatgagcaattctggaatcaagttgaagattgggttatagaagaacttcagaactatgccaaccgagcgactacaggacaagttttccagcgtcagctattttcggacgatgcagtacagggatttgcctttgtggatatctgccgcaagcaatttgattttatcgtaatgaatcctccatttggtgaagtaagtattccttcaaaacaatatatcgaagaagtttatggagataccaaaggtaatgtttatcaaacttttgtagaatgtttccaagataggctagtgccggggggatttttagggattatttctagtagaacaggctttttcttagcacaatcaagcgattggcgtgaaagaatattactgcgtttgtatcgtcctttattgttagctgatttaggttctggtgttttagaagcaatggtagaaacagcagcctacgttttacgcagtattacagaagaagaagacagaaatttaactttaaatattgtccctaagctactagaaattcctctagatagacagaaatgttttagtattgccaaatatcagaaatatcggggcggattaaagcgacatcaggctactcaggaattaaaaagactgtgcgaaactcattatatatcattaataataggtcattttattcgctacaaagttaatattattaaagttcaaaagtctgaagttcctagttatttaccatatccaaatttaatttgttttcgtctgttggaagaaggagataaagaaggtgcattgatagatataggactcctatttgatttttgaaaaaactccgtacatctgaagagtggggaaatcaaaggtagtgtgtcgaataaaccactcaaacatccacttcaaatgcgagaattttgggatcaaggcacagaaacgtcgaacccatgttttagcttgcaaccaaatatcctcgatagggttttgttctggacaattaggagcaaagcgaacgcagtgtattttccattgctcggctggtagaccaagatttacctcatctaagaagcctcgaacttcgttggaacggtgataactagcgccatcccacaaaattagcaatcgctggttgggggagtgagctagcaaatactgtaggtaatcaatagtatttttagaatttccgctatcgtaggcttttagtagcaattctcgttcgagatagtcaactgctccatagtatgtctgtttatctcgttcgttcacaactggaactgctatttcttggtcagttttcccccaaacatatccacttaaatctccccatagcaaatggcattcatcaagcagcaacactctcaataagcctgtttcaatttcctctcggtggtttgccagcagtgttgcaatctctttttttttgctgcgacagcattctcgtcggctttgggatttaattttgtggttttcttccagctaattcctgctgcatcaaacaggtcgtagtaactttgctttgattcataaattacgtcgtactcaaaagctaatttgtactctagttcacctagctcccagcagtttttagtttgcagccaactcaatacttcttcttgctgttgagtactcaggtagctctttctccctttgtagttcaagcacagtccattaattccatcttcctcataggcttgtttccagcctgttatcgagcctagagacacatctaaaatagcttggatttcttcgtacaagtaatcttggtaaaccaatttgactgccaaagcttttcttgcctcacgggcatcacgacaagctgctataaaatcttgtaactcagcgatcgcagttgccactcctccaggtagtgttgccgtttgtagatgctgatttatcattgtctgctcttacacttgtaaactcttgcgtattatctcgtaatctttttcaaaaatcaaataggaatcctatattttacaaaattctaacgactctagatgttttttagtttctccagaaagtttgtcaatggttcccaatacaccattttgttattgggtaggtgacaacattcgtcagttatttattaaactactgccgtttgaaagtgatggtagaattgctcaacacggagcatcaacaaaaaaagatccaaggtttctaagcctttggtgggaaatactacccaacaaaatagtaactggtacggtagaaacaacaccgcaactgttctgtcaacaaacttttgagggtaagccttgggttttatttgctaaaggtggagcttattctccatactacgcagacttacatttgctaataaattggaagaacaatggtgaggaaattgaacaatatgttttatataaatacccatatttaggcaaaagtggtgcagattggattctacatagagagtgtaaatatttccagtcagggatcacatggactagaagaacttctagtagaatgagtatcagaaattttccagcaggtagtatatttgctgataaaggcccaacagcttttgtctcagatcaaatttattggttggggcttattcaatcttttccatttcaagtattaatgagtctacaactggctgcggcagatgcagcagcacgttcttatgaagtgggtttaattcagtgtacacctgttcctgagatttctaatttatacaaagaacaaatagtaaaattatctgaattttgtatttatattaaacgctctttagatacagtcaatgaaattagtcatatatttaatatacctgctttactgcaagtaataggtaataggctggtcgataaaagttttgcttggcaagagaatataaacaaatccactcaccaattaagcaagtatcaggagcaaatagatgatattgtattccaactttatggaatttcagaaaaagatagaaaagctcttgagataaccgttaaaaatcaaaatttaaatgttgaagataataccgaagatgcagacgaagaacatgaaaccgcattagcagcagacggaaaacagttagttactgatttaattgcctacatagtaggttgtgcctttggccgctgggatatccgctttgctacaggcgaaaaatcagcaccagaacttcccgacccctttgcaccattaccagtctgttcaccgggaatgctcgctggtactgatggtttaccactttcagaaactcccccaggatatcctatccccattgcttgggatggcattctagtagatgacaccaatcaccccaacgacatcacccgccgtatccgtgaagttttagaaataatctggaaaaacaacgccaataatattgaacaggaagcttgcaaaattattggtgtacttgaattaggcgattacttccagcgtcctgcaaacttctttcaagaccacctcaaacgctattccaaaagtcggcgcaaagcaccaatttactggccactttctacaacatctggttcttacacagtttggatttattaccaccgcctcacagatcaaaccctctacacaatcgtcaatcgctaccttgaacccaaaattaacgaagttgagcgtaccacttttggcttagaaaaagaattagaggcaaaatctggacgggaagcttcacaagtacgcgataatttacacgcaacacgcaaattcctaagtgaattgcaggatatgaaacaggaacttttgcgcgtcgcacagctaccttacaaacccaatctcaatgatggcgtaattatcactgctgcacctctacaccgtttatttggtttgcgacaatgggcgcaagaaaccaagaaatgctgggaaagtctggaaaaaggcgaatacgactgggcgcatttagcctacacaatttggacagaccgagtgcggcaagtctgcaaaagagataaatcaattgcgatcgcccacggactggaagaagtttacgaagcagctaacccagaaaattcccaacccaaaacaaccaaaggcagaagccgtaaaaagacgatacaggagtccgtataatgagcgtttcagactttgttcgccaacaattacaccaaagattggaacagcaccgtattgtcgtttggtacgatagcgatcgcgcttttgctgattttattcaatctttccaagctgactcttgtgtagtcgtatctactgttgagtctattttgaactcccgtcgtcaagccgaagccgtttaccgccagatgaacgagcctgatgacttagccaaagctgggttgaatctcctcatttacgtaccccgcaagcgtggaataatagaagatgaaaagcggcaagatccgtttgaagttttcgcatgggctggtgtagcgtttggcgacaaagaagcagaacagttagaatctcttgccagacaagcaataccagaacgaactatagaaattactaggctatttgcccaaggtagtccaacactatcgatgttagatagattacagttccatcaccgttcgcctttactgctagaggcgctaggtactgactcaccatcagaagcgatcgccttagtcctctgcctagatgaaaaatcacaacgaattgattccgtcaaaggttgtttaaaagaatttttgcccttactagcgacggagattggctttaaacctctattaaaagctaaatcatggacagaaattagaaagcaactcggtcagtatgtgctattcaacgagtttgccctcgacctaccttgtgaacttccacaatcgttcagcgccttacccagagccgaagctagccatgaattagtaatttttgcagtgtgcgatcggatgcgagacagttctgacttgcgatcgggctatgttcagctagcagtacaagtagaaaatcaattacaacttagcaatctcacagaaaatttagctcaactaggtactagagataccttcccctttgcagaaaagcgatacttacaccaagtgctggagtatgtgcaacaggataacttagcagatgcccaaaggattttaacgcaacgccgtcattctatctggaacaaccacttggaacgaggtaatatttggatgatagtcgagcgttgcgtcacatttcttgccacaagcaatgctgtagaagacttgtcaaaaaaatctttacagtcaatgtctttgcgccaaatcatctctgcatacgcacccccagatcgctggggatgggcagaactagaccgtcatcagcgactatttgaacagggtgcaaccgcttatgcgggagatgggggagagatagaatctttggtcgaattttgccgccgacgttacttagaagtggcattagcaatccaagaccgcttccttaactgtgttcagaaagaaggttggtttcccgaaggtgtgttgcgacaaacccaagtatttgaccagtatgtagctcccctactggaacagaacaacaacaaagttgcattttttctagctgattccctgcgcttcgagatggggcgagacttggcagaagctttagaacagttgggcgaagtcgaaactttaccagtagcatctgttttacccacaactacaccttgcggtatggcagcactgatgcccaatgctgatggtacgctcagactagtagaatcagacggagagctaattcctgtcttaggtgaaaggaaattggaagagtccaggcatcggatgcgactgctacaggaaaaatacggcgatcgcttcaaagatatcgaaccggaagatattctcagcaaaaaggtaaatgccttgggcaagcagttagcctctgtggatttattagttgtccgcaccaaagaccctgaccgcattgctgaaagtattggcaacatgaaagctcgaaaatatctttctgatgtagtcagtgaaatggtaaatacaattcgtcgattatctacaattgggttcacccattttgtcattagtgcagatcatggtcacgtcctagttgacgaaataccattaggagatgtgattcccaaaccaaagggtgaatggttgaaaactaagcgtaggagtttgctagggcaatttatatctggcgaatctccaaatacaattatcttcaaaactgagcaggttggtatccaaggagatgcccaagacctctgtgttgccaaaggctttaaagttttccagcaagttgaaggttacttccacgaaggcattagcttgcaggaagcgatcgtgccattggtaattttgcgatcgcaaggcaaaattactactcagagtaagccgaatatttttctgcgttataagttcaattactttgccaacaaagtaatcaatctgcgagtctgctatgaatatttgctaccagaaccaatacaagtccgcatcgaagcttacgatggctcaacaataaaagccaagcgagtaggtgaagcaaccgactgcgatgctagagacgaacgaactggagaaattattcttcagccaaatcaagaaatttcagttcctattttactggagtccgacgacatttcatgctccaaaattgagctgcgagcaattgatccacaaactggcgtaatttgggcaaagttagaactagaaaatcgcttactagattaagaacgaactcatgtttcaagatgccttagaccaaaaagttaatcaaatatttccaggaaaggtagtacgtaaggacttgctacatcaaatcaagggcggagaaaacgtaccatcctatgtactggaatatcttctgggaaagtactgcgcctcagatgatgaagatgaaatccgcattggcgttcaggctgtcaaagaaacactgcaaagcaactacttccgccacgatgaggctaacaaagcccaagcactagtagaacaacgaggacgacatcgatttatagaccgtatagaagttcgttatctcgccagtgaaaacaaatattgggcagcaatggatcactttagttactccagaattcatgttgctgaccgattttatcgacaatatgaacgacttttagaaggtggaatttggggtcttgtagatgttgaatttcaaccaactgaagaagaaggtgccaaagcaagtccctttcacattgcggacttaagaccaattcagttagcaagatttaacattgatgaatatgcagaaggtcgtcgcagtttgagccgtgatgaatggattgatattttgctgcggagtgtgggtttagaacctacccaaatagaacaacgcttgaaattgctgttactgactcggtttattccctttgtcgaaaaaaattataacttcattgagctagggccacgaggaactggtaaatcctatgcctatagtgaaatgtcaccttacagcatcttaatttctggtgggaaagccagtactgcgaatcttttttacaacaatgcccgccgtcaagtaggtctggttggtcattgggatgttgtagcttttgatgaagtcgggggtttaaaagttacggatgcagatgcaattcagattatgaaagattacatggctaacggtcggtttagccgtgggattactcaagttttagctgatgcctccttggtctttattggtaatcttaaccaacctgttgaaactttagtgcaaaatactgcaacagacttatttcagccattaccaaaagaatttgacctggctttacttgaccggatgcacttctacttgccagggtgggaagtgccaaaaaactccaagaatttgctgacagaacactatggttttgtcactgactatttagctgaagcgtttcgtactctcagaaaacaaaatcggtttgatgaagtcgagaaagtcttccgttttggttctcatgtagaaggacgagatgcgatcgctgccaaaaaaaccgttagtggattacttaaaattatccatccagacggagaatggacaaaggagaacctgacagagtatgtagaactagccttagaaggacgtagacgagttaaagaacaactcaaaaagcgaggttcttttgagttctacaaaaccagcttttcttacatcgaccaggaaagtgatacagagatgactgtatgtgtaccagaacaaggtagtgctggaatcatctctcaggaacctttacccccaggcacagtgtacacggccacagcaaatgaagaggccagagttggtctttaccgcctggaagttgcttgtacatcggggacaggaaaattgcgaacccctacagggctagacaaagctttaaaagaatcattaaacagggctttcagctatcttcaaagtataaaggaaaggaaaggacttaacgagactctgggactgaaagacatttatgctgaagctgtggacttatctggaagccgtgttgaatgcccttgcggtgtagcgttttttgtcgctattatttcagccatacagaatcgtcaaattcaagccggaactctgattttgggcgatttaacaattcaagggaatatcaaaggccctgcttcaattgtcgaatcactgcaactagcaatggaaagcggagcgctacgagttttagtaccactttctaataagagccaatttgcaggtttaccagaagaggttgtcgaaaagcttgatattgtgttttacggtgatgttgaccgagcagtaattaagagcgttgaaatttaaggctatatcttatcttctaaactcagcaatgtctatcctgtttaggtaatacatatctccgaaaacgaatctaaaacccttatcctgtcaaggcgaaaacctcatttctggagatgtctaatgatagctaagagcgatcgcccgattaagcgaatccttattactgatcaacatttataccttttggagattggacaggcatagagaagtaaattggttttgagagattaggcgattgctctatacatattgccaactcaacatgaaatcaaatagagtgcgatcgccactgaggtatttttgtgaacactaccatgccagcaatacaattagaagatgtttaaaaatttgaagagtccatcaaattgttgttacataaaccttttgagaaattgtttaatcgttttatttgtttgttagactaagaatcaagtgtctttgaaagtcatgaatcaaattgtttaaccgttatttcttatttatcacgaaataataagcatctgaggcgctcaaattgttcaaccgaattatttggctacagtttaaacgctactacaacccaatgtgcaattcctcatggctttttgaggtagtcctcaa

SEQ ID NO: 883 - DNA, 31399 bp, Nostoc sp.
  source 1..31399: mol_type = other DNA; note = 'Peltigera membranacea cyanobiont' 232
gtgtaatgaaataaaaaagttggataataattttaaaagttggataataaacaaaaagttggataataagtctgaaagcttttccatataagggaaagtaaaaacttgcctgccgccaccttgtcgaaaccgatggtaagatgggaaggattgcaagtcacagtaaattgcactcatataccttaaaaacctgaagaattgcagcccatagaacaactgtgatgagataaccaacttggataataattctaaaagttggataataaaccaaaaagttggataattaagtcttagacaaaaagtagtcagaaaaaaccatcaaacccctatgcagatagagtttggcgtcgttaagcctagtttattgatatagctaagtttcaagcatttttgagcctttagtgttttttccttgccctgcaaggacttgaggcttgtttttgcctcaaaaaggtttaagtcccgatagtagtgattcagacgctctctactcctgcggtgacaaaattaaaaagttaaacaataagcctaaaagctttacgatataaggaaaagtattagaaattgcttttttttagatgggctttattttatgagtaaaggatggactttaagcacgattgatcgcagattgaacaatcaacgtgggctgggtgttggcaaacagtataaaccttggctaacagtaagagatcaatcctctagtggccggtctgctagagaacctggttggaaaactggtagagtgcatcatttccactcagacctcgaaagatatgcattttatatgtatgagttctgggatcaagtattagatatcagagaacaatttcctatgttcgatgtagaactggctatgacaatagcaaaggaacagggaatgcaaaacttcagagatccaaaaactaaagttccttatatttacacaactgatttcatgcttacgatgaaccttcatgggcaagaagtcaatgttgctcgtgcagttaagtctcaccaacagttaaataaacgatctgttcgcaataggttgttattggaacaacgctattgggctgctaaaggaattgaatggcaattagttacagagcaagtaatatcaaaagtgtttgctaaaaatgtagagtgggttcacaatgcatactggctagaaccaaccagggatttgaatatttcagagctactagaactagcaaaagttttaaaattaatgctgagagataatgatagtactgtaaccaaaataacaactaggctagacaaagaaaatgatatagaacgtggaacatcgctttacttgtttaagtatttagttgctaaaaaagaagtaattatggatatgtttgaaactcaaatttttaaatctccttcaactcgattaattaaaaaaattgttttttaaaatataatatattaattgcaattattaatacaattaatacagcaatacataggaggtaattaaatggaagaaaacctatatgttaacgatttaattgaatgggaattagattcagggaataaagtattagaaagaattctttggattgatgaagattatactattgcttttttaatagatgttaatacaaataaaggattaccaaaactaaagaaagtttccgaaattgtagaagaaatttctaatagattagcttttaaacaaagagtagatccctgggcacgggtaattcgtgaggaagatttacgggatactgaaaaagtaattagagataaagcatggaatattatttcggagcttgttctagaggaaccattaatttatgagagaaaagctcgtgggtcattagttcaggatgccatcggtaaatataacgcaagagaagacaacaataaattaattcctaaaaccgtctatggatacctgagaaaattttggcaaagaggtaaaactaaaaactctctaattcctgattatattaattgtggtggtagaggtaaaactaaagcatatagtgaagttaaaagaggaaaacctagaacttataaacacattaatgaaattggtgaaggcataaatattacggaagaagataaaagatgcatcttgataggaatagataggtactataaaaaaaaaaaaaaaaatatctcttaatcaagcatataaattaactttaaaagatttttatacttatgaagattatattgagaacggaaaattgaaattcaatttaatacccagaagtcaacagcctacatatacacagtttaaatattggtataatattgaatttgaacaggatgttaaaacaagtattatatctagaaaaggttctaaggcttatgctttaaagcatagacccattttaggaacgtcaaaaagcgaaacccctgggccaggttccaggtatcagattgacgctacagtcgtagatgtttttttacgttctgtttataacatcaattggataatagggaggcctattatctatgtagttattgatgtttttagccagatgatagtaggtgtatatgttggtttggaaggcccatcttggataggagcaatgatggctctaactaatgtagtaactgataaagttaaattctgcaaagaatatggtattgaaatttctgaggatcaatggccttgtaaggagcttggagattgtattttaggcgaccgaggtgaactaataggaatgccaccagaggatacattaagccctaatttatatattcgcattgaaaatgcagcatctaagcgaggggattggaaggggctagtagaaagtcgctttcatattttacatcatgaaactaaaccatttataccgggttttgttgatcaagaactaaagcaaatgacaggaatagattaccgtcttagaagcagactaaatattgatagttttactggaattgttattaatctgattatttcacataacaatcgtcgtcataatagatatcaaagagatacagatatgatcgctgatgatgtacttcctataccgacagaactatggaaatggggaattgtaaatcgttctggcaggttgaaatcttatgatgaagatgtggttaaactcaatctgttacccattatcaaggcaactatcacttcccaaggtatcaaactaaatgggaaattgaataatttgttcaaacttaaaggtaattatttgtactacacttgtgaaaaagcagaaaaagaacaatggtttacgaaagcaagaagtggtttacttactcaagaagaaaaatctatagctgtttcttacgatatcagaaaacctaattttatttatttaccttctcgagatggtagaagctttgaaaagtgttcgcttatagatccagaagaaatatacagtaataaaagcttttatgacattgattataagcttactaaagaagatgtagaaaaacaggaaacacaaggagaagaattacaaaaagaaattgatgttactgtagatatcgaaaatattgttaatactgctgaagataatttcaaactagaccaagataatactattactaaaacacagcagatagctaagattggagagaatagaaaaaatgaaaaaaatcaaagaagagaagatgaagggtttgagctacaaagaacacaaagtgaatctatttccgattccaaagatgaagtacaaactaaagatacaagttctaacaagttattagtaccagactatagtaatattctcgagcaaaatcgggagggccgtaaacgtggacgaagcaattaattttaaaatatatcatgaatgggattggaaagccctgcctaatggtggattaatagctatagcacgatataggcaacataaacatacagaatataatctaaaccccttaatacaaacccttcctgaaattatttctaatcaagaatttcttaacaaagtaactttggaacctgatttatctgatgaagagataataggggaagcacatgatagatttcattgtgttgaaagattatctgatttttattttgagccattaggtaaaactgtatcattatatcgtttagtctctacattaattatgcggggctatttacaccgtaatcctttggtttcagaatatgcaaagcgttcaagagaaattaatgaagctgtgcaagacggtaatggaacaaacatattaaaatatatcagtcttcgcatatcggcttcagctttaacattaatcggcccttcagggatgggtaagtcaacagatattaagcgtatactttctctttatccacaggtaatcgttcacccaaactataagatttatcaggttgtttgggtcaaagttgactgttcttccattggctctttgaagggattatgtagcgatatattttttgctttaagcagaatcttaaaagatgaaaaataccaaaaatatgctgtcccaagaaactctgtagattatatgctggctgaacttgcacaagtagctaacactattaatttaggagtattagttattgatgaaatgcaaaatcttgcaaatacaaaaacaaatgaaaacgatatattaaattacttagttgatttgagcaacactataggagtacctataattcgcattgggacaccagaagccaagccgattctaatggggaattttagaaatgcacgaagaggaggagaatgtattgagtggcataggctaactagagcaactaataaacaagatgattcctggaagaaaacagatttttattaccttataacaggattgtgggtttatcaatggacaaagacatctgttaaatttgaaaaggaattttatgatactttttataattgtagtcaggggattattgatattaccattaagctttacaaaatggttcagtggaaagcaatagcgattggtggtgaagaagagattagcgtagaattgatcaataaagttgccgcagaaggcttgattttagtccagcctatgctggatgctattcgttcaggaaagcaagaagatattgaaaagtataaagacattgcactacctgatgaatatgtcacaaattatagagaaaaatgtatatctgaactaatagggagacaacaacaagaaattcgtgactcggtacggaggcagcagggcagaaaaagcattttaccaaaggtacgtgcgataacaacggaactactgaaaactgaaaagttagggttagattttgataaagctatagaatatgcggaaaaagttgtaaattccagcaaggaagataacgatattttgacattaatcaaaaaggctcaaattcttgctttggatggtgattcagtaaagacaagtaaatctcaagaaagcatacagagtaaatctagttcaaaaccagcaactaataaaaaacggcaagcagcaaaaaaaacaaataaaaaacaaaatttaagtggcaattctcaatcggatgaaggattggagacacttaatcaattcatctcagatgatataactaaaattcagtaataattatgctgaatggttttcctcgaatttatcctgacgaacttttatatagtgtgattgctagatatcatattagaaacgcttacaaaagctttcaccaatcagatatggaattatttggatatgcatcgcaacaaatttacagagttgttttaccctgcaatctaaatcatttagtcagagaaatacatttgcatttattctacgagctaaatataaatgatttaatttatcatcataccttatacccattttatgcaagttttttacctccacaggaagcatggctactcaaaaattatatggagcaaaaagctaatgtttccctttctgaaatattaaaatgtcctcgaaataataaagaagaagcaaaaacatttttaaaattttgtctttactgtatagaagaagatacacaaaagtatggagaaccttattggcatagatttcatcaagtccctggcgtaattgtttgtcccattcatcgaatagctttgaataatagtttagtatcaatagaaacgaaagaaatacattatcatgctccaagtgacgataactgcccacttaacaccagcacaacaatttacaatgatgcaactctacaaaaactattagtatttgctaataatattgagtggctgattaataataatttcacttttaaaggtttatcctggcttcgcagtcactataagacttatttaactaataaaaactttataacggtattctctaaagataaatttatatttcatgagcaagaattttataatgcagtgttgacatattatggacaagaatttttagaagccattaatccaaaaataataaaaaatccagaaaaatattttagtaattgtctacttgcctgtgacgttaacccagtaatcgaccgcattatacatatattaataatcaaatttttagctaattctattgaagatttttttaaagcataatagttagctctttagtaaagaactaactattatgctaaacgcctaaagacatcttatattgaaaagctaaatcagcaggagtgaacttaatcacaattttccgtttataaacgcctaaaggcaatctaatattgaagcagggcaatagttgccagttacaatttacgatctctctcgtgatcaacgcctaaaggcaatctaatattgaagcaggcataacaataatcagggattgcgatcgcaagaacgtgatcaacgcctaaaggcaatctaatattgaagcagtactttgccagtgttccagaaatgataaaggctttgtgatcaacgcctaaaggcaatctaatattgaagcagggtaatccctaaacttattgattcataactatctccaggtaagattacaagcacctaccgcaaaacatctcgaaattgacacagtgaaatggtttagccccttatttcaagcctaaaaagcttatcctgtagtctttctagagattgcaagcaccttaactcagcttgaaactgctgaatactgcatttagcaaggaacacagacgctttatcctcttgtcctgactctacaaacaggtatccttgcaaatatctgacattctctcttgttgattgaaacaatacacctctcaaaaattttttgtattgggcaaggtaatatgagatgtaattggagatgaatattatctaagctgtctggattacagtccacgataattcaggtggttgccgccccaaggatttttgcagcatataacgctgccatcgtgttccctgtgacccaacgtggtcaacccaataaggtagagttagcaaaccctcttcattttgaactaaccactcaaacgactcgccttcatatttttcagaaaagaagctaacagaattaactagatcgcggctctctcccaagcacagtccaccaaaacgattaatagaagcagggttagtcaatgccaaatgtagacgttctggcaaagttggttttgatttatctgtacctgcaataatccaaacaacaaattcgatattagtcaataattcctgataatcaggtttaatattgctaggatcgttgatatccagttttttgaatcgatgaaacttccgaattaccgtagattttttaggttcagagaggagtgcaattgctaactgagttccacagtgcgtataacgattcatctcgccaatcatagaaagcaacatcccatacactgtagatggtggcggtactggataggtttccacatactccctggcgcgagattggcgaaagcaagctacaggtacttcaactttcaaagcaattgtcgtcatgttcttagctcctcaaagccaactgcaaatcttctgctataacctgttttaatgcttctactagggctttcactcctggaaagacatttgctcctaaatcttctagagtcttggatatagctcctcctatccataattcttttggatcaatatctccagcttcgacacgtcgaactaaatctggaactgtgatatttcttcgttcatcttcttcaaagcaatatagaaaacgaggcgaagaatcatgtgtccaccgcagtactatactttcaggggagaaatcatacaaaaaacgagcatgatttcccgccacttcaccaatagaaatcaagccatctaagacagcatggatgcgagatttatctttaaggctatcaggtgtcaatgcaaaaccatattgataacgagtggcatgaatctctgtagcataaagagaatttcggtttttaattccactaacagcattaaaggtaatgtctcccataaagggtatcattgatactgcacgagtaacttctaatacacctcgtctagcagttattttacctttaagcttttgctggcctttacgtcgagaagtttgcttatccttacccttagaattttttttattattatcttgagatgctccttcggactcgccctcagactcatgtgacgcttccatttttgctgcttctgcctgcataaatcccaaaacatcatcatcaataaagcgaatatcatcaaagttgtggtcttgcatgatatgattcgctactggttgagcattctcatcccaacgtctatttaccagatagccaaaattttgccaatagtaccgtaatgcccaacgaatcgcctcagatgaaaccgtagtgtgaacttcacctttccaatctaatttttgtaaaggggttacattaccttcattatccccccgattattagctgcggttccgtaactagtcaaaatattgccgaacaaatggaacatttaaattttcctaaatcgattgttattaatcacatagtccctatatatttgattctgttgttttgatttttggataactagcaagagcaataaaagttaaatccttggctattttccaatccattattcctgaagttatggatagtatttcatctagatgttcttgcaaaattggattatgtcctgtttttccccaaaactctgcaataaattttcggaaatttacagcatttgtacaacgctttagctgagatacaatgcggatattttctctttcaatttgaacatattcatcttccttagttcgagcataaattttcgcatatcttatttttaatgtttcatgaacacatttgatgaatagtttttgagtttctatatcccattgggaattagatatcattttgtagattccttgattatcatcattactgagttccaataaataattatcttgaacctttgtagataaattaaaccaccaaggcaggctgtttgctaaattgtctgcaattattcctctaagtatatttgcaataataggtgtttcatttttagatttaaaattttggtagtttggaaaaaatatgcaactgagtttataaactgaattaactgtttcacttgcctgcaaaaatgctgtttctgtacgagttttttgctgctttgaccaagcagcctttccaaataatattaccaggcatcgttctactggattaaatgcagtctgttgtacatttgtttcataagtcaagaatcttaatcctgcatctcccaaactagatgcatgaaagtagtcaaaatctaagtcagttaaattccaacaatgttgagcataagcttctaagtcagttacttggggtattactaagataaaatgaggcttttcccgttccaagtgagatcccaaaacgaaatactgacaagcaacaggagcaaataacagtgctaaagccagttccggtttttcatgaaacttagtttcttcacgaaaaacctcatgacgaattactgctcccggataaagccaacctactatacctattggctcttgtaaaagctgaccttgtttgttgcataggtgttttgcgaaaacttggtgtgcatattcatctacctttttataaaggacaatagcttccatttcatcaattaacactgtagatacgttaccagcggatttaaaagacttgttatgctgaagaaacgttcctcttattcctagatgcttaattattttggtttgaatattccctgtttgagaatttaccccaggcaggtcaattaaaccctcatcactaattttaaatgattgcttcagtaaccagtctaaaactatgaaatcttcttctccatcccagtcaagacttatagaatgaggagtccgtgaccaagttaaattactaggacgctttgcagattcaggatatagtttttctagttgtcctagtgtcatccataatcctgctactcccgcaatgtgtaatctagttaagctcggatcacttagatttaatcgtattctcgatttaactgagctcttcgctatagacatactatgatgctttctaaaacatttttttgaaatacaattaaatttttcctgatttctaataattattttagtggaacgaaaaacccacatcccattttatgctttccaccaatactatatgcttgtaagattaatgaatcttcctcactaagatgctttacttctaatccgaatcccactaaagtagattctttaactttaatagttctacgttttggagttccatcaaaattagcttgaatattaaccgttcctttaatccctagttgttctatttggcgctgtgctacttttaaaaaactcctgggttcttggcaacgtttaataatgactatacgtgaacgcaatttttctgtaggctgaagtagctcaatttgaggaatacttaatctaatagtatcttcaccaattctgagtgattttcctgccagcgaataaaataatggtattttatccacaggtaggcgaatccgtaatctagaattttggttgagatgaagtttaccaaacttatcaggattacctgtaatacgacaaattcttactacttttgaatcatggagtttaggttgaaacttagaaattccagaatacaagtgatagcaatgatctattgctataatctgaccaattgctctaaaacttaaatctgcatatataagctgaagctggcaggttaaaaattcttttctattggtgcaggctaaagtttctttatagcagttatcaacagttagcctgtaatctattgccatgtattttccttttttaaaattctaaaatcatttgttccttcagactacgctggcatatttcaatttatctgataacagatatattaaatgcatattacatttttaatttcttagccaatgtttaatttcttctatccctggcggctctaggcttatctagcccatatatacagtacgatcaacaggatttatcgctactgtgacccaaggacgtacaatctgaccattattgtcaactatagaaatatccatacaacatctgtctactatgtaagaggttgtttgaaaatatttaggcatcaagatattcctctatttatttagattaataacaaattagaacagctatcctttatttaaaattagaaattttactgaatttaattaattttttggtaaaattaattaaattctacggttatcatttgatcataaaataatacacccaggttgtaatattttttcaattaatccaaccaacgtaatagtctatattagttaatagtctataaagctataaccgttgctaaataagctttacatggcttacgcttatataatttattatatatttttatgattattgataataatatacatcataaagtttccaaatgaaatcttttaatttgtacattttttagtattgaaaatatttactgcaataaaacaatttttctatcaagtattagaagtaaaagagttgacaaaaaataataatcatgatttatgcaaggtaagaaatgatttaaatttacactactgacatcagatccttatccaataagcatttgagcaatctcaatttgatagtactatcagaaaagttgcattattttcctgtcttaagtattaggattattacagactattaacttagcctaagttaactttatactcagtgtttgttcaactgattttaatgctgattgtatatctgcgttcaaagcatctgcctcagtttgaatagtacttacactcttactgacttctgctagggattttttgatagtcctgatacgtctcaaagctgtgcggatttgttgaatctgttgttcaacagcagtcacatccagttctgattcaaaggtacgcaatttatttaacctttgctggatcaccaaaaagcggatagcaatgattaaaaatggatgggttgtagcaatccaataacccgactcagaaactccctctgcccaatcaccaatttcctgcgctaatccttcacgcgaataacttaaaaaaattgccgaatttgcagaacgccgcaccattgctgactgtaaatgttgagtgattgcttggcgaccaaaaggctttgagggtcgtttcctagcttcaatcactattgacagttcaattacagctaacgatttactggtgaactttaggagaatatcgccagtatccccatcacgaccaatatgctccacctctactccactcaattttgaccaatttcgtagttcgacaaccactaactcttcatagctgatgcctttagcagttgtctgctcaagtacttgttgtgtcacctgttgatctcgaatttccctggtcagtttttccacttgttcggttaatggtttcacagactcagaaaccacatctttaactgccgcagccaaagtaccattttcctttgtggcatttattaatgctgctttaaatgcgccttgaattgaatcagagcgtttggcatctaagagttgacgtaatgaagagagaaagcggccaacaacagaagtttctctggcaggatctatttcttgtgtaagtaaagtgctgacgctattgagtttttcagtgaggatggctgaagtcagattaatttgattttgtagtggagctaataattggccattatctatccctacttgactaattaattcctgctggaaagactctgcaattaccttgactgcctgttgaaactccaccaacaaggattccatctgttgcttgattaattcgttgccatgacgagtttgagcagtttgcaagcaaagaaatcctaactcaaaagcatcccggcaaatatcctcatattctgactgaggaaattgttgtaagtagctgatggcatttttgagagggattgccatgcgatgaatcaagacatggctttgggtcaattcaatactggagggcaggtaataggagtcattggtggaacggttcatggaacagtgggtaggctggtgacgataaattgcaccctactacctattttttatgtcagtcaaggtgatgaagaaaagttttgtcaatttgcaaaactgaaggattaattcggtggtggagaattatgccactgttccaacagaggattaattacttcggcgttggtgaaaagaaaatcagccacagccataattctctgataaggtaatccagcttctcggcggctggcttgtccacccaaccagtgataagccgtagatttagagatggcacagatttttgctaattcttcgtaacccaatccccaacgatagctaaaatcttggggggacatgaacatttggttatgcaattctagcaactgctgatgttgttgagcttcagacatgattgccttgaagcctttccaagaatgagttatccaagggttcgatatcttcctcaaaagcgaagtcgcagctacaggtgtcacgagagggactgcgctcatctaaaagaaccaagtaatgtaagccagtggcaatgcaactggcttgttgggtgtagattactccaatgacacgaccatagtcaccgttgggtacttgaaaccatcgcacccattcaccgagatgaaatctctgctggggtaattcgttgggaattacttctggcattgctactggcggtatttgaggaaaaatattaggcataaaaatctacttagttgcagattaaccaagaacagcaaagatcagaaagaattccgttttgtaaacggaaattttccagcatggtgaacaatagttatccacgccaagcttaaaatctcacctgtttttctttgatcagcaaactaaaccctctcggcttgattgcaagtcaatactagggttggttgttatgatcaatcacatcttactcgtttttgatggtaaattctatatgtacacatagaaatttatgatttacttgtgtttcttgtagggtgctactgctgatacttgttctaaaagctctgtaatcgctggttgaatttcctctagcctgatggctataaggttaatggtatgagcgacttcgagaatttgtagcactgtatcaggtcgtttctcaaattgagaaccccagttcttatcgattgtttggtacgaatagaccccaaaggttgcttctgtgagcgttcgcacgcacgcagttctatacccccttttttctggctttgggcttttaacgtacaaacggcagtattccattggttccattgacggtttattctgattacgtcaattaatgattttgtcgcctctagtaccgtaaataatactcattcattatggtaataatttaaactaattttccttctctcagagtgaccgaagaggagtaaatcaaataatagttgaacctggtagttctgtaactggtagttctccccaagtttcaatttggttaaacgtatgccggctgaggggataaaaccgcacgctgtcttctgaaactttcacttgtttatggagtctttttcgcagttcattatatttattttggtcaagaacacattcaaatactgaatattgtactcgttggccatatccttctaataaatcagacacttttttgcgtcttttatcgcaaggtatgtcatatactattacataaaatagcattcaacgaatttcataaggcttatagagtttgctaggctgataaacgaattctttaaaagatttaatttgctgtgtcattaaatcccaacgaggttgtttttctccctgagaattttgtacttcttctgacaaacgttgtaaaaaatatttaatatattttgggcgaccagagttattcagatagcaacctccatcatgatattcaaaatcgttttgagtatccatgactttgctattgattaaccaaagtaccagggaatcaataattggggcgcgaaattcttcaattaaatcggaagcaagagcagcatgacgttctgtgccttgatgtaagcaagcgtgataagggtctaatccctgaagttcaattattgttaataggtgattccaaagaatttggtatccaaaactcagcatggcgttgactggatttcctggtgggcggcggctacgcgctaaaaatataaaattgggattatttaaacactcaccaaaggctgaaaaatattgtgctgcgccagcaccttctaatcccatcaatcgttctattgtttcagcttctcctgatttttgacccagaacttctaaacttttgatggcaatttcagcggtttcggaaggattgcgccgttgctgtcgcagtaaaaatgtccggctatttttcagtttgacttggacaatttttctagctgctaacaagcgttcgattgctgttaattgttgctgataacgagataattgacgataccctcgttcaattggcatgagccgaccatagcagtatcccatgcgggataggtaggcaatgggtatatctcgccatagacaagtacgaattgcctgagtagtgatttgagatttaccaaatattagtatttgttccagcaatggtaattgtacttcgccgtgaatagtttctccttgtttaatgattagggtttcagctttgaggctgatataacaaccttgtcgggaaacgtagagtgtccgcataaaatttcaagacaatatcaaaggaaaacggttaaaatgttgttagttattttttgttttctttggtcacttgtgagtgttgggaaatgatttcagcttgcaacgttttcatttgggatggttgcaaaaaattcactacagcatcacctgctgtagcgttgacaaagctggcgacggcgatcaagattgtattgatgattactgctgctagccccaaaggtgctattaacaggataattagagtgatagcaccgttgagtaaggctatcccaagattacggattaatgcagcacgcgaagaaatatacataaatatgatgtttgatgattgtttgtgttttctctataccttaaaattaggggctggttttagactttgctagtggtttcatgcgaatgacaaatttactaagtttttttactttctctgcggcagggtcggcaaaacttgaaaatgcctatgtttccgttgaccccgccgatgtctttctgtacaaggatttcagcgtttttgtattcccctgtaaaggtaaaaatttctctattctccgaccccgtcgcaaatggcatctggacatcagacaccataagggtttaaataagaggggtcgcttctccaatgagaagtggaattaatggaaacaaggcagtattcgttatttcttacccgaaggctgcccgcgacctaagtcgcttctccaatgagaagtggaattaatggaaaccatgtatgcaaaatttgtttgtattttcatttttttttagtcgcttctccaatgagaagtggaattaatggaaacggtaaggatcgctggtgcattgtttgtcatttgttttgtcgcttctccaatgagaagtggaattaatggaaacatggcttgcatgcaggggattcaatcactctatcaacagtcgcttctccaatgagaagtggaattaatggaaacacagttgaccaagtacctccagctaatccacatcccatgtcgcttctccaatgagaagtggaattaatggaaacgttatttcagcagcacaatagaataactctcctaaagtcgcttctccaatgagaagtggaattaatggaaactcgtctgtagcattccaattgaagttccaaatgaagtgttttgcttgttgcttctctaatgagaagtggaatttccctaaataaaaaggtcgagatgtaaacatcctgacctttaaaagtattttggaatatatatttttatttcttactgctgataaactttaagaatcgcctcaccaattcccttaaccttagctaccaattcctctggctgtactaccttaacattaccgccaaaaccaacaatccaccgcagaaactctacatcacccaaataccatataggcaataccacgcgaaagcgattaggaaactgtttatttgtggttttctttaggcagaaaattgacttaggtaacattagtcttccgccctctacaggtggagacatattcatttgtcttgcagggaatctcttagtgccttcagcgataaatcggaacatagcatcgttaaaccacagttccactgtaatacaagcttgggaatgttcttgcttatcgttagaaagaaacttgtgctggtcactggcgctataccctaaaaaaatccctgcgctagcagcagaaagcttctgtaatttctgtaatgatttttcctgttcctgtttagaacggaatcttccttgaaattgacctacaaacaatctatccaaacgctcaaaccggaacaatcctgcatactttccaccttcacactcaaaacctaaataccacgcttggttacaaaatacgatttgcaatggaaatgctaaaaaaaaaccttcttcatcaagagcaaatttaccaccgccaggaaagcgatttaattccagcaattgtcctttaattattgcctcttctaattgctgtaaattcttagaaagggtatcagatggtaaaaactctggttcaatcatactacgatttgtgatcgcccgtaccggatacacattacttacccccaacttactttttaccatccgtgtagcaaatatttcataaatctccaatgctacaggatcatcaaggcttttagcttgagactggagaacatcaaacactttagttaattcatgtgttgataaaatcgctgtccctgcaaaatacccatctctcaagggaaattctggcaatattttataaggtttgagaaccttttcaatgtccttgcggacagtatctaaaccatcgccatcgataatcccattttccctgagtgcagacacgagcgtttgcaagcttccctttcctgtatcttgcaaaaatgggtggtggagaatcaagcgaattatttgtatcaacctccaaaagctatcgcagtcagaataaggatgagttacaaaagtcgatggtgtaatagagtgatcgggtggtacagtgatgccagaagaaggggcaatactattgactccaatgagggaattttgttgtagccagtgtaagtcaaattcaatggcatttttattagcgtaagtcgtaccgcataatttatccatgaaggcggtaacttcctctaaggaacttgcaaacgcaggagcattacccaaaatactttccagcaaagtgtggttagtggtttgcagatttccaattcctggatagcgaataattagagaaattaaatgcattaagcgctcaaaatccaacagcttactgtaaccgtgtaaagtaatgtggcgattacgattagcgcggttagtaagggtacgaggaagctgctggatttgggttggaatttgctgaatgtcgaacttggaagatgtgacatcgatttctttgacagatgcaaatccctccgcagctattggcggaaagtcttggagagatttgtgcatattctcaatgatcatgtctggaacttgtcgggtgcgcttttggttccacaacttgcaagttgcaatcggggtttgcaaatgccaccccatccacaaaacctcttcccgatgctctgcaaggcaagcaacagatgaatttagctcttttaacaaatccatccgccatacacgcttggcattggtagcgtcatagattacggaatcaccttgagctattgcatcagcaatctcagaaattactttttcttctatatgactccactcaccctggatacttgcattaccatagagtttttggcgaattgcatcagtggagacaatgcgataattccccaattttgctaactcgaccgcgaaggtggttttcccactaccggggataccgatgaggaagtgacagatcatcaggagttcaagactaaaagtttttctactttaacttttaactgttatttgtttgttgtctaggcttttcaagcgaatgacgacggtattaattaagggttgaattaatttagcttctcaaacacagagaagcgaagtaatggcattgttttgcattaattccgatttaacccaatcggtagggtcaacgttacggttaatggtggcaagacggaggtaaccgtttccattaattccgatttaacccaatcggtagggacatggtttagcctatgcgctgataagtaattacttgtttccattaattccgatttaacccaatcggtagggaaattttgctccggctcttattgctttgatgattgttggtttccattaattccgatttaacccaatcggtagggttgctggtgaagttgtggcaaagaatgtgtaaagtttccattaattccgatttaacccaatcggtagggttaagaatgtgtatcggcacgcagatggtcacttggtgtttccattaattccgatttaacccaatcgcattcttattaagggagtattttcaaaatcagaggtggaaaaaaccttattgtccgcatggaagggaatgttgaaggaatgtcggtgctggatagaggagaaattacctgactatacatactactgggagagggagtgggcaaattggggaaaccacgcctgggaaattttttggggagaaggcgacagtattcaagcggcgatggatgatttagaaacccgcaaactttgccgtgggtggactgctgtcaactggattggggagagttctagtttaacaggtacggatggaattgcatttcccggattaggtggagaagcacgaaatcctaaaaatcgccagtggactatagaaaaagacgatattaaaatcttctataaacgccttgcttgtgtattagaaaatcgttctcaagatacagaaccagaaggtaagttttttgcactcaatgaaaaattaagtattcccgaattagtgaaacgtttagtcacgctgccagaaattgccaacaatttagggatgtctaaactagaaagcttcagcgaaatttatagaggccccgaagccaaaaatgagcaaggtaaaggacgctggacaggttggtttatgggtgatggcgatgaagttgggaaacacctaaaggaaatagcagacttagaaaatggtgatgatgaactgaaaaagtttagtcaagcgatgcgtcactgggggaaagactttagcagagacttcccccaagaaatcggtcgggtagtttatgcaggtggagacgattttttaggtgtaatttatcgagacaaggatcaagaagcgattacagcccagcaagctgttgcatggttaattacattacccaaaatttgggaaagacatgaccaaaagataggcttaagcgtcggatttgtttgggcaggttctagcgtccctcaaagagatattttacaacattgtcgtgaagcagaaaagctagctaaatcttcagggcgtgggcgagtcaccatcagaattgtctttaacagtggtcaatatgtgcaatggacttgtccttgggattatttaaatattttgaccaagtatcaagacagagagaaaaaagccaactggagtcacatttatcaagatttagctcaattagaatcccgacgtgcttttaatcttgataaaaagagctttgtcgaaaaattcgctattgaattctttgacatttactttccaggtgaaggcaaagaattactaaattatgaacgtgctaaacatcttgtgggttttgatgatgaagatgctccttatgatagagcaaaagccacaattgattggattagcaatttaattaaagtaggctggcatttatgttcaaatacctaattactattcgtcccttgggattaatgtatggaagtgcaggtgcatttctttcaccagaaaatctagtgggtcgttctggtgctaaattccctccagaagccgcgacactctcaggtttaatgtttagcgttaacaagacaacagaaaagtttactcaaagtgagttgagtactaacctatgtgttgcaggcccattttgggcgaaatacaacgaaagacaaaatttttatattcctatcccttggcataaaataattgccaaaaaagccgttgatgagtggcaattaaaggatgataaatgggagctagaaaataaaagcgagaaactagaaccagattatcgttggcaaacgatagattcttgggggactccagctaaagcaatcaggactaatgaatataaatctgttgctgataatccttggaaatacgtttcttttttgcatcccaaaattaaagcaactgagcggtgtgtagaaaactccgacggactttttctagaaaattctgtccaaatggcagacgatacctgtttagtttatctatcaacatatcctatagaaaacggctggtatcgttttggtggtgaaaatcacgttgtcgaaatagaatgtgaggacatcaaaaataagaaatttttaaatctattaaatcagccaatagaacgtacctttgccttaattacaccagctacatggggttctaaccgtttctctcaccgccatcctcaacatgagagctttccccagacagtagagatgctaacagataaaccagtaccctaccgttaccgcgccaaagggaatttaggaaggggacgttacgcggttccggctggtagtgtttatgtgcttgcagaacctttaaacaaaccttggtggtcatgggatgaagcatggtttcccaaagaaggttacagccttaaacgtgtaggatgcggtttatgtttgccaacagaaattaaaggagtcgcctaaaatgtacaaaaaagcttatggaattattgaaactttagcacctctgcacgtcggtgcaactgctggagaagaaagcggtaatttaaacctcatcttccgcgaccaatttactcaaactggtattcttcccggtagttcgattcgcggtcgcctgcgttcagaaatgcgtctgctagatggagaacaagcagcaaattattggtatggcaatgaagcaggttcagaacaatcagaaattaataatgagtctattatcaaatttgaatacgcttctattctctggctaccggtcttttgtcctggtcaaccaattgtgtgggtaagtagtccacgtttactccaacgctaccaaagaattgctggcgatactgtcaaatttaatggtaaatctctcaaagaaatagatataccagacccgtatacaggctccaagaacttaaaagcgcgggaatcacaaggtaaaaagaccctgtttttcaacttaggatttttgactatcaacaaaaccgtagacttatccgcttggtttccattaggaaaagaaaagccagcagtgatcgtagacgatagtgatatttccatgattcatgacatggctttatatcgtcaaagtcgtgtgcgcttaaaacctgaccaaaaggttgtcgatggtggtggcttctttaacaccgaagccttgccagaagggactattttagtctttcccattgccatcaaagatgataaatcaggaaagcaatggcaaccattaaatggtactcaaagcacagatatttatcttggtggtttagaatccattggttttggtcactgtagtttaactttaaatggggtgtgaatatatgacttggaaatcttacgacttagaccaagaagcacaacgcctagtcctcaaacaccgcgaccaaaaaggtgttattggtcaatctcacaagatgcgaataactgtagcttacggcttagagagattttggggagaacaattgcgacttttagataaagaaaaagccaaaggcgaatattggcgtgatacatggaaaagctttgtcaaaattatgcaactggctggaattaagcttcctcaagaagatgtcagcaataatgaaaccttaaaaattcagcagttcgccgccaaattatgggaacttccaattgaagaccaaagaatttgtttagctgtgcttactcaattctgtgacagtttggtttggtggactcagcgctacaaaaaatcaggatttgcagatgaataatagtaatgaagttccgttaatgtttcaagcgcaaatctcagggcgcgggcagattcaatatatcagaaatcccgaacagtctgagagatgggttgatgaatgggtagaaggttctgcaatcgaccctcccacatttaacaccaatgttaaaacaaaagaatataaaataacttggcgctttgtttctaacagtgggcaagatgaagatataattcggccagtcatcgctgctaagggatttccgttttaccccggcgcaagcatgaaaggtgcttttttacgtgcttgtacctcagaacagggtgcaagatattgcggtggcaaactaactagcaatgatactataccgggaattcttcgctttcatggtggttatcccaaagatgcaacgtgggctgaacaaccattaattgatgtagttcatcctcaacaggattggcaaattaaaaataacggtagccactcagcatttattcagatatccctctatcaacctaccttaatattcggtatctccagcaccgaagcactagaagccagtgaatgggagactatctggagtatttgggataaagctatagaacgaggtattggttctagagttagtgccggttatggtcaaccgataaatcacccagaaaccaaattggtctctgttaatctgcgtggacaaggattagcctcacaattaattgataaaacaggcgagtttcgtcccaatatttttaaagctgctttacgtggtcacaccctgcgcttatttagtggcattactgatgaaaatacagccgaagaattaactagagagctttggggaggatttgcagggagaaatggtgctgttgtcggacagttaggaattgcttttaatgctgttgatttagaaatggatgtatatcggtatgggaatgtaaccatgcctatctatgaattaaatgcaggaactttaaatattcttagcatgggtgatacctcaaaagaatataaaaaagaattaaaaatattagcaacacaaattttaagatttgctatgctgcttggtggctttggtaaatcgtggcgacgcattgaccatcgtctattctttccagagtatttaaatggtaaacccatgataggttgtcattgggaattccctaagcaatcaaatcaatactacttcccagtaaatagcctcagtcatatcactaatattctgaatgatattcataagactgtaaataactggatgaaattaaaagataaaaccccaagtaataaattaacttcttggcgcgaatcattccatccgcaaaaagttcaagtttggggacgtattgcacaagacgaagatgatagtttagctgtgagatggtttcacgggaattaccaaggaagcaaatcaattaaaggctcaaaccttacaggtaagatgagtcaaattggtagaatttggcatcgcatgtacccgcactacaaaatcagagacggagagatgaaacgtcagggaagaaggtatgtagagttactcaccatttttcctgataaaaaagatgagagaacagaagaatttttagctttcttagcaaccagcgaatttaccaaactttggggggagtaaatatgagtatttggattatcacaacgggtaatagcgatgtcctcctcaagcatagtaaaaattggggaaatttatacggtgaagtcagatatgatttggagtgtacagagtttgctccacttaccccgaaagatccctataataaagaggcgggatatccagtaagtgctaggcttttaggtatagtctatggcaataaaccagataaatacgagtcagatttagaattcccacttcttgatacttattatgaatattttctagaaaataacattaagctggaaaggattataattttacttacagaccaaactgaaatatttaaacaagaccaaattatttatgaaaagtgtccctattggcaagatacttgtacacttaaggctctactagagtggtatttacaaggaaaatttgactgtcaattagaatttttatatcttgcaccaaaaactgatgataaaggtatagataattggaatgaaaccctttatttggtagaagaagcattccgcaagttagactttaatccactaaagcctgtttatgttagtcatcaagctggaacaccggcgatatcttctgctgtacaattcgttagcttaggcagatttcagaaagttaagtttttagttagtaatgaatattttgatgaaaattatgaacagaaatctaaatcagaagctattgaaagctctaattatcggcgggggatacagattcaaaaagtaaagcagttaattataggaggcttccctggcgcagcgctaaaaattttagaagatatagatagaatagacaaagctgctatagctagcttagagaagattgttgatttctttaatctccatagtactctaatggatagcggacaagattttgaaattacgcaagctactcaacgcattgttgatgctctcgatctcataggttttttctttaatcagaaaaattatctccaagggattactctacttgctgctgctcaagaaacctttttaaaggtggctattctatcacaagtagcgatgattaatgaaactgtgattttaaatggtagctctcaaaaagtctgcgatttattagagtggattccccgtggattatttctaaaagcatctgttaattatcaaagtattaatgagaaaaaagtagttttacaaaaattaaggtttcctgtagatagatttagatttaatacagaaaaagattttgatattaccaataaaaactttgctctaattgcttggttaaacaatatagataagacttttcccaagtggccgttattattatggtattgtgactctaatagaaagacagaagatgacctccgtaaccaattaatgcataacttgtgcggggctgaagagaaggaagtaattgattatttattggggtctaaaaatcatcaagcatctgatgtaatgactacctatgtaaattctgttaaacagccattcttagaggcgataagctattttaaacttccttataaaagagataagttgaataagaaacttcaagaagtagcagactctcttatttaacaggtaaagatataaaaaaatgagagtatagaaacagccggaaacttggaatgcgacatccctattatcgggaatttctatgggtcttttggcgatcgaataatctttgctatggtcaaggatctactttttgctttctagagtggaagctcttgcggcggggtcagcaaaagcgggaaatgtttgttctttcgttgaccccgccgatgtcttactgtctaagggtttcagggtttttatatgtatgtaatatggttaaatttggctgtaactttataccccgtcgcaaatggcatctggacatcaggctacgtaaggggttaaataagaggggtcgcttctcttcggagaagtggaattaatagaaaccatagccagagcgctgggcaaggaataaggagtcgcttctcttcggagaagtggaattaatggaaacactgcttgtgcagtataatctacctgtgcaataaagtcgcttctcttcggagaagtggaattaatggaaacaaaagggcgtacagaatctaagttaaagatgtctccactaactatgtggaggcgaattaatggaaacttgatttgggttatgcgatcgttgagttcatcttgtctccactaactatgtggaggcgaattaatggaaactaggctgtgctgacgcgcaaactcacttaggttaggtctccactaactatgtggaggcgaattaatggaaaccaatatcatcttgtgtgtagttaacattcttgtctccactaactatgtggaggcgaattaatggaaacttaaatcaaacaataaatgagttggggaaaccttatgtctccactaactatgtggaggcgaattaatggaaacgagtatgaagcgaacgaccatcaaaaaataatgtctccactaactatgtggaggcgaattaatggaaacgcttgctaccactgaatacagtttttgcaatttgttgtctccactaactatgtggaggcgaattaatggaaactccgtgtggttttaccctactctattttagagatggagtctccactaactatgtggaggcgaattaatggaaacacaattattcctaataataggatacaaagaaaagtctccactaactatgtggaggcgaattaatggaaacttgtcaaccgcagtctgaacgtcggctggtactgtgccgtctccaataactatatggaggcaaattaatggaaacttctcaacttactcgataaactgaaatccacaaatcgtctccatataaatggaggctaatcaatagaaacaacaggtgcgaaagcttccccttttatttctccgctgcttctcctcaagtttgcgccgtcactaaaacaacaactaaataatcaaatcagaatttactgctccaaaacttccaactgataaattctcaaagatggatattctgccattaagcgccagcagcagtgttcaggtggtaaagaaggtctgtcattacaacgatataaaaatactggctcatctctcaaaagtcctgttaatgccacttgtttccagtcctgttcgcctagatcccaaattagatgcgacctaccaaaatatcctgcattcattagactagcaaatagccactccataatctgctgaatttgttgcatctcaagcgcactatcaccttgaccgtagcattcgatttcaaacttattagattttggctttatcagtcctagcagtaaggacgggattttcaaaagactattcattatccaggcacacccattaaatatatttatggtaggagaagggtaattttagttttcccaataattcagatggtctatcaaataactataaatatttaattaactgttctggtatagacattttaaaatttaacagttaaaaataattaattgttgtatgaacgtctcaacacaaaatttatagctgattattaaattaaaatttcagcagtattttatagaaatcattaaataattatatttatggttgcagctaccaataaccaagttgttgcttggaagtttattgaaaccgagtcaactggtggaacaggttatcaaggtgaacgaatcgtctgggacacagttcgtcagaagttgacacaaggagaaggtattgcaatatggggctaccgcgctttctcccaggaagaacgaagtcgccgcgagatggatattttacttgttagtaaggatttggggctagccatcatcgaagtgaaatctatcgctatcaatgatatcaaaaaggttgaggctaaccgatggaaaatgatacctggtttttacaaggaatacctcgctccgatcgagcaagctgaaaaacaagcgtttagtatcataaatcgctgcgacagaaactcattcctttacgaaaaggttgcagccagagttattgtagctctaccaaaaattacacgtcgtgcttggagagataaaggatttgacgacaaccatcttacctgcccaccaattatcttcaaagatgatttagaacggcaaccagatttactcgattacattgctaataatgctacggttattcgtcacgctgcttcaactttaaacgaccagcagtggcagcagttacttaaacaagttgtctctccgataccaaataaaacgcctccagtcagccaaaaaaccacactgtcaccgcgtagtcaagctattgttcacctacatgagtggattagcgacgttgactggcagcaaaccgaaattggaatgcaaatacctccagggccacagcgcattagaggcacggcaggttcgggtaaaacgcttttgctttgtcagaaggcagcacggatgcatttacgtcatccagattgggatattgctttagtattttttacccggagtctttataacttaattatcgaactagtagaccagtggttgcgctattttagtggcggagaggtttgctacaacgctaaaagttcaaaacttaaagtactgcacgcttggggtggaacaaaccaaccaggactgtacagcacgatttgtaaagcttctcgtgtgcaaccgaaaaatgtgagccatttccccaatttcactccagaaacggctttagctgctgcgtgtagagatttgcttgaagttacaacaataccaccacaatttgatgccatcttaattgatgaaggacaagatttaatcattgatgacgatgcactgaaatttaaaggcaaacaaccattttattggatggcgtatcaagccttacgatcgccagaggcaaacacaccagaactgcgacgattaatttgggcttatgatgaagcacaaagcctaaacagcttagtaattcctacttcaaagcaagttttgggaagcgaactcagtcaaattatcggcggtagtagtgggggattctaccttggcaagattagaaaagctcacgttctaaaacgttcgtatcgcactcccaggtgtattcttgctgctgcccaagccttgggtatgggattattgcgacccgaaggaatgctggcaggaattaccaacaaaaaggattgggagcgaattggctatcaagtaacccaaggagattttcgcattcctggagcaactattactttaacaagaccccaggaaaattcacccaatcctatacggacgctttgggataaggaactgatatcgtttcaattttacagttcccggcaagccgaacttaaagctttggctaattgcattaagcataatattgaagatgaaaagctaaatcccagccaggatattttagtaattgttttggggaatagttttgaaaccaaaaagctccaagaacaaactgccaatcattttttggatgcgggaattaattattatattccgactgcaccaacaattaatttttttccggataataggcacaatgtttttccaaaccgtttttggaatccagatagcgtgacaatagcaggaattcatcgtgctaagggtaatgaagcaagcgtagtttatgttgttggcttagattacattgctcggaatgaaagcaatattactgcacgcaaccaactttttactgcgatgaccagaactcgtggttggctttatttaagcggtattggcaactatcctatgtaccaagagattcgtcaggttatacaaagtgacagcacttttaccttcacgttccaacgtcccaagcgtgatgtgagcgaataatttgatagctcacgctatacaggactcgtatttggtttttgaaaaacaaaggtgactggaagcttgctatacaaaggtttcttgctcactttactgagcaaaatttaattaagattcttatatcaatagcatattaacataacttaatattttccctcgccgtcgactgttaatccttcagacctctaaagcctttatttacaatgctttcaagaaattatccaacttttttattcagattttacctcatgtaccagtatcagcttctttaagctcattaaattatccaacttttaatttttctacatacggaatagcaagggtttcaagccttaatattatccaacttttttatctcgtcacacttgcaacactaatatcattcgcattattggctctgccaaatcatccaagtattgattaagttgctgcattacttcttctggaatgtagcgagggagtcttttttctatcttaggaaaatcttcaggacgaaccaaataccttcggacatcaagccattgatattgataagcggaatcaaaaaacagttttgcatcactaatacacttatatctggtacttgatgctaatttttgacttgctaaatatattgtgtattcagtgatgacatcgcggtttatcttttccgggataatatttgggtagttttctgaaaaaaactttgataattttctgattgaactgagtttttcttgtacagaagcgaatgt

SEQ ID NO: 884 - DNA, 32767 bp, unidentified
  misc_feature 1..32767: note = Synthetic
  source 1..32767: mol_type = other DNA
cttttcgctagaaatgtgaagttttgatgaaatgctagtctaaacgacggatagtaaaactgtgactttacccataactttgccgcagccagaaccataactttgccgccaacaacgctataaccctctttcttgcgtcagctaattttggatgaaattgacacactggaaccataattttgccgttagtcaaaattagaaggataagcttgccgtgagtccaatcaagcatagaaagcaggaaagagccggattttttagaatagagcagaagcagttcatgctggtgtggaatagaaactttcggctatccatctgttctgaataactactggagtattagaagctcctcctaaccagtgagaacattgcgaacaatagcctaaactgcattgccgctctaactaaagtaattggcgatgacaatgaggacaattttgcacaagaggatattgatgtattaaacaaactctaaaatatttaaatttttctcgaaatttccatctatggcaaccatattaattcagagtgaggaatatttagacttaacgtttaaactaagaggcgcaccgattcctcttgataatggttatcctatctattctgctttgtcccgtatttgtcctccccttcatgaactagactctattggaattcatcctattgccggaataccgaccagtaacaatttccttgaactcactgctcaatctcgtctaagaattcggattcatcatcaacaaattcctttaatctacccttacctaacgggtcaaacttttcaactagggcaacattcttatcaactagatattcccgactacaaaccattaatctcttcagaaagcgcctactccagattagtggtaattaaagggtttcaagactctactaactttattgaagctgtgcaacggcaactggataatttaggaatacaaggaaaagttgaacttcttacccgacaagatggaacacctcaacgaagacaattaaccatcaataaagaaggaaaacagtttaaagttagaggatttggcgtaaaaatcagcgaactcaacccagaagattccttaatcttgcaagaacagggcattggcgggaaacgaaagatgatgtgtggaatatttgtcccagcgactcgcagcaaggaagaagaggaaacctgatcgtggttcctacccaacccaaaatttccctatctctcgatgctgcggatacgacaataatgcaccgcatcggaatgacgggactttacatgactttaaagcgattagaaaagcaatatccctcatctcgtcaacggggaggacatatatcatggtttttgactgctgatactattgaattattctgggaaggaagtgatttcgtcgccctatcttggttaattaaggagtcttttcaattagatgatacaggcttaattcatttagcaggattggacaatgatggaatagatttaagtcagaaaatccatattcatgagggaatatgtgctgtttttctgcgacttaataagttttatcaagcaggaaagctagttaacactgaactaagggttgaagagaaaaaagtcgagcatcaatacaaatccataacttggtacgcacatcaaacctttgcagaaaagttatgcgatacaaatacccaacaattcagacaggattatgttcaaataaccagttggttgtatttagggggaattgtccgccatgctaggaggcagaatattacaaaactggaagagaaacctgaatacgccttagcattattatttgtaccagtagtttgtcactattgcttacttcatattccatcagaagacttgaaggaaaagaaacctcatcgctacctggtggtgattccagacatcaaggattttgaagacgcttctcaaagaagatggcgattacagcaattagaaactaaacaacttcatgttagtagccttggtgaagccggattactttattacagcttagacaacattcaacctgaaggcgactactatcaagcttgtcaagtttggttatatgaaaaaatgaatcgaacttctcatcaacgtacattgatgagtatagaagaaattaagattgatcgaaaggctttaattagctataaacaagttcaacaatactttcaacccaattataaaaagattcaatctaagcaaatttttattgaagtgaatccgattcgctcgttggttgctgagaatttagcaaaaggaattcattggttgtctgacttttgggataaattggtgatagaggattcaaaaagatatttatttaaccacttattttacaaccgagaaggactcataataatggcagagactattgaatataacgaacaatatttaatttttattaaagtatttcaacaagctatgaggggcaattttgctaaaatgtatgccaaagcagacgaaggaaaacagcctccaattaaaaagaaagttgaacgattaagagcagagttaaactgttgttatgatgaattgtccttcaaggaatatttgtctgattttttagtaagagggggagtaaataaatattttcatgaacatcaaaaataaattctactattgctcaaaaaaacaccttggcaagaattaagaatttggtcattgttcgcaatcgctagttataaacctaaagataagccgaccgatacggatgataattcattttccaacagtcaaaaaatagaagaagtgaatgatgaagcagaataataatatccccaattattatctttacggaacagtcctcactcgttatggtttagcatccttaaattatgaaatgagaagaggaaataagactaccctgcaaaaaggctattggaatggtaaaattcattcttttgtaggttcaagcgcaattcgttgggcgttacgcttttatcttcaaaagcaaggttatttagttaatcgagtttgggatgaagacgaacatattaatcggttaacaagtgaagatttcgatccagaacaattttatgatgatgatatttttgggtttgctttattagagtctgctgaaacagagggggatacttcaacaacaaagagaaaaaagaaacaaacaaaagtgagcagtcctaatcagcgaatgggtgctttagggatgaatatggctgtttcgctcacgccttatgatggtgcagtcaagttaggggcaaaaagtggcagacaaaaggatagcacatcgcttcattttacagagtatcatgcaactcgatatcaatattattttggaattaatgtcactcatctcaaagatgtttctcggattttacctctgatagatgggatcatgaatttgcccaaggtaggaggaagtagtaatatttttaattatcctttctgccctgatagtttagtatttcactggacaaatcattttgcttcatatatttcctattgctttgagtattgcgatcctaagagtaaggaagcaaaactgacataagagtttatagatgaagtgaaatgcggacagattgaccctagtcaattgtggattgggggaacaattgttgacgagttacagcaactagataattttgataagtctccctttaataaggcgcatctttatcggaatcggaatgaactgcttgaagctttaaaagcagtcatcaaaagggatttggggttagaacaatcaaaatgattgcaccagtaattctctatttggatgttccatttgcgacttttagggagtcctatgcaagggaaacgggaacaacttatcctgtccctcctccagcgacagtgtatgggatgttgttgtctttggtaggcgaaacggatgtctatcgccactgtggggtagaattggcgatcgcgatgttatctagccccaaaaagtcgcgaattttgcgtcaaatgagacggtttaagaatactgattttagccatccagagaatgttattccatgttatcaagaaattttgtctaatctgaagtgtttgatttgggttcgttctgacggggagaagatacaaccaagtttaaggcagaggatacagttagcgtttgaccatcctgagctagtaagacggtttggttgtttatttttgggagaaagtgaccagttgattaaaacgatcaaacttgcaagggaagattatctagagggggtgaaacagtgggcgattagggataatcaaggcaggttaactttaccctactgggttgaccatgtagggtcaagaaatacccgatttttgaggtatcggcttgaggaaatgtcaagctcatcgcctcctgatttggcgtggacgatgattcaatctccgtttgagaagtatccattatgaaacagggaatttaggataggaaaatggtggaaaggattacagggtaaggaatatgccaatttagttaaggaaaaaggtacttgccatttttgggaaagtttatctgggctgggtttgaggggtcgaaggtgagtgagaaattggtaagttttgcgtttttggtttttctatctgaaaggtagttgtaagattgtaaatgagcctttctcagttaatggttttcacctttgctgtgattcttggctttatgccgttaggcgttgctcagggtattttgtggggagtagtgataatgttttcttttgtgattcttggctttatgccgttaggcgttgctcagagcgcgatcgctggcttgaagttgccgtggaacatcgtgattcttggctttatgccgttaggcgttgctgtacagtgactaattattagtcgtcagtaacagattactgtcagcgagacaaattatgtgtcgtcgagacaaattaatatcgctaaggtagtagtgacaaattaatgtcattgttgcagggactctctatgtagatagagtgaaggaagcgcggcctttttatccacgtagcattctgagtctcggacatgaaagcgagctttcaacccaccccttgttgggatggtcgttgaaacctcaacgaccttaaacattttttagcagtaaggaagcggctgagattacgggctgtagtttgcgccggttgcagtattggcgggaaaggggggttatcgtacctccgattagtgccactggaatgggacggagtatttattactctcgttctgagttagctgagttggcagtgatggaatattggctatcggtgggattgagttttgaggtggcggctagggcgttgcaggcgttgaagcagaaagcaccggattttttccgctctaggggtgcagaagcggtttatgttggtctgggataggaataaaaaggattttcggttagaggagtttgaaagggaagacgcgatcgcatctctagataatggtcaacctgtaattcccgtatggctggacgagattcatcagcagttggcgattagcttgaaggggtaggtgcgatcgccgcattgttgcatccaatcgacttttatcgttgctcgatctggaaataattgattggggattgctgggaagacaaaaagaagtcggtactgccagcttaatctcaatagctttcaagtggagcgcggttcaactcatctttatagaaacgccaattaggaaggaatcggttcattaacgttgtaaatcgctcgttgtgatgccgttctaaaagatgcgtcatttcatgaacgacaacgtattccagacagagcggatctttcttagctagttcaaggttcagccagatgcgtttcgcttcaatgttgcaggtgccccatttcgttttcatcagcttaattccccaatcatttacccgaacgcctagaactgctgcccacttttcgattaatggaggaatttcttgttttaattgttgccgataccaattcatcatgactttttggcgttgggcttcgtcgcttccttctctgacgtagaggtcgatataggtattgtttctgagttttactttggggatacctttgtgataaataacattcagtaaatagcgtttgccttggaaatagtggttttcacccgatacatattctctttttgattggcgttcttgtgcctcaaaattggcttggtgctttttaatccaagagatttttgagatagcaaatagccgcactgcctcatcatctactctgagacgggcagcaatacgcactcgtccatcgggcggatacacccctagatggatgtttttaatatcttttctatcaacgtcaatgactaaatcactgacccttatctgatgcatcctaatagtcgctttgattcttcacgatgtcaaaaatgatatctactttttcagatgagtcaaggtgttttttaattgcattttttacttcacgctccttaattttattgccgcgccaagcatcttttttagtttggcgaatttcattgtcgatcgccagtgccagtgcctgattttggtctaagttatcgtacaacgctcgtttggcagaggaatccagggatggggggtactgggttgaggttgcaggctgagtaacttgtcggctcaaggccacaattttgttcaggtagttttcatactcctgagcggctgtttttcgctcttgaatcagttcatctaggagtgcggacatattgccgaaatatttagggttggtggggcgttggtcaatgataagtttgcgtaagttgttctcaatggtttcggcaacagcttctttgttttgtctaatgctcttgggtagggtgtccactgcatccttaccgcgttccacaatcaactgaatcagcgtcatgtcatcaaaactggaaagcacttcgctctcgtctgcgccgatgtaagtatcgatcaggtggcgcatagccggttcgtaagctttcaaatcaatggcatcgccgctggcaagttttacttcggcgcgaatttgttcgtaatatttgacctcctgcttgatggtttcaattccgctgaaagaatagccagcttctggcatatcattggcaaggttagcgtaagctcgaaccagagaagcggtgagtttgtagagggtaactcgcttttgttcgtgttcttttactaggtctgggtcttccgtattggggccacagaaatagcggatgtaggcaaggctatctttcgggggttctacaggttcgcacagggctttaatactctccctggcagtttctagacgctctactcctttttccaggcgatcgctcagtaacccgtttacatcgcctgggtcgtagccatcaaaggcttcgaccgtatagtggtgaacggatttttctaggctcttgaacagatccttgtaatcgatgatgtagccatattctttatcgtcaccatccagtcgattaacgcgacaaatcgcctgaaacaaaccatgatctcgcatggttttatctatgtagagataggtggtggggggcgcatcgaaaccagtcagcagcttatccaccacaatcagcagcttcatctgggcgggttcatcaacaaatttctttttgacctcttcctcaaaagcttcgggggttttacccttcagcattttttggtaaatctcatactgccgcagcttttcggtgtattcgtctgtgccagtgctttcgcctttgatgctttggagggagccatcgtaagaggtgacgatcgcacatcgtttgaagcctcgattctggaataactcgtaatacttgcaggcttcgtagatgctgcctgccaccagcagagcattgccccgaccgctttgtagacggtctttggtttcaaagtctagtaggatatcgccgacaattttctctagcctggatgctgaactcaagaccttttgtagggtaccccagcgttgtttcagttgggttttggcttgttcggtcaagcctttagttttggcttcaaaccactggtcaattttggtctgggaggtgatgaactgatcgacgttgcgggcttcgtagcgtagatcgaggacgactttatcggctacagcctcgttgaatttgtaggtatgaatgtaatcgccaaagacctcaatactattctgcttgtccttcttgagtagaggggtacctgtgaagccgacgaacagggcattgggcagaatttctttcatggcatcgtgcagtttgcccgattgggtacggtggcactcatccacaaacacatagaggttgcctttggcagtgaagttgtttgggaggctgcgcttgaggtcttcgatgtagctgttgtagtccgcctcgctgacctcatctttgtctttcttgccaaatttgtggatcagggagcagagtagccagggggtagtgcgatcgaggttgtcgatcaggtcgttgccgtttttggtgcggtagatgccttcattgacgcctttgaaaacattctctatctgtttgtccagttcgtcccggtcagtcacaattaggacgcgggcatcggtgagattttcccgcatccatttggtcagccacaccattgtcaggctcttaccgctgccttgggtgtgccagatgatgccgcctctgcgttgttgtagggaggtttgagctgcttttacgccgaaatactggttatggcggcagacttttttgatgccgcgatcgaagacaatgaagtcgtggatcagttcgaggaatcgctctttttgacagagttgcagcaggtgtcggtctaaacggttctcaacggaactgtcttctttccaagccagataattcttttccggggtttcaatcgtgccatagcggagtccttcggtgtcattgcctgccatgacgaattgcatagtggcaaagaaggatctgataaatcttgaggtttggttatcgaggttttggcggatgccttcggaaacggaaacggtgctgcgtttgagttctaatacaccaagggcgataccgttgacgtaccgtaccacatccgggcgtttggtattttcccctttgactgtcacctcttcggcaatggcaaagtcgttttctaaggggttttcccaattaatcagccaaacggtttgggtgttttcgccgacttcttctcggactttgacgccatagcgtaacaggctgtagacggctttgttgatgtcgtaaaggcttttactctggtcgtctgcgacttttttgagttcgtacaaagctttgtttattaggctgtcgctgtagctttgtttgtcgcgcagaaaggcggtgaggatgtcggtttctatgttgctattattggggcggtcttgccagttgccgagatagcgatactttaactgctgctgaaacagttgcacgacacggttttgggttaagcgttcccgttgtccgacttgactcataccagtcgagtcctcccggtgagaagttcctgcatcattccctgtttgatggctttgtatttatcgcgcttttgctctaaggcttcgatttcggtgtccatgtcggtgaggacttgggcgatcgctttttgttcaggtagtgaaggcagagctataggaaaattttttacatctctactcgtgatattcggatctttccggctacttatagcaatatttttccaatagcaaacttgaaaatttaaatagttaattaagaatgttgggttcagagtctgatgctgtggctgaatagctattaatgcttgattaacggttgccgctatccttaatagacctgttctcccaatttggttaaatccaccatacatagcaactaaaacagtgccaatatcatatttccttaaacaggtttcatttaatgctaattctgtaattttttcctccgtataatttattacactattatttaaatctgctgtttttacccaatgaatattgccatttaagtaatatcgctcttctagttttctcgatggcgttgttccagaggatagtttgctgacttcttctaatgtcttcacctcccactcaccgctaaaaccgggtaggcgttttttgcctgtgaggagttgctgcattgtgccttgcttgatgttgcgctttttggtgataaggcgatcgagttctgcgatcgcggcatcggcatcactgagagcttgcgcgatcgctttttgttcaggtagagggggaagaggaatttttaattgcttgaagtatggaagacctatagttttgatggtgttaccaatagcaatccgttcaaactctgacttttttgcttgtaaccagtaataaaggaaatggttgtctaattgtgaaccacactgccaagccataaaatgctggctaactgccattacatctgctgtaatagaactcttaccaactcctgcatcccttgatagaacgacagtaccttttggatgtaagactgctgaagagttggcaatgcctgcgggcgtaattttagcggcagtatcatagatatacaaagcgtcaagacgatccgaatctcttaacgagatccacttaatgtcgccatcccagtattctgggtgctttttgtttggtgtgtgaccactcccacgctttgcaacagaatctagtaaagtcgcctcccaatcaataggaatcaatcctacctcagtctgttgataaccttctgctatttccgtcatcaccacaccattcccattttcttcaaatgaacctccacccgactcgtcaactcatccacccgacttgtcaactctggcaaaggcatctcatagcgttctgccaactccttaattcgttgcgttaaccgttgcgaaatccgatccatctccgagttaatcgcctgctgcaatgtcggcatacacttcttatcaactaccaagcttttaatctcatcctgcgttaaatctccgtattttgttaacacatattgatgcaaaaactgagtttttagtttaatttctttactaatttccgcctcttgctcaatcaattttaaataagcctttaacacctttaactcatcggcaaacgttggatcattcttaattttcttaatccgctcattaacatttgctttcgtaattttgccgctatcatttgtcacttcctccagcaacccgtcctcgccgctgtgttcttcctgtagttcctcctgctggcgaacaatatcatcttttttcgtttcctgtttttcaatctccgcctgttcagcttgaaaatagcggttaattatcaactccttgggaaccagttcgcagatataatcgataactgcaccttttttattcgtcaccgcttttacttcagccttccagccatcctctaccaaaatataaacatcatccttcatactttccacccaataagtcatgaggtgctgatagacatcgtatttatcaatcagactttttccggtaaaagcttgcaacaaatcttctgaaagactgtaaataatatccttgggatgatgtcccggttggatatctttcagccaaggtgtattttttgcttgccacccttcaaaaactgattgaatttctttcccatatctaataaattcgggatagtcgaaaatgcaggctttgacctcctctagggaaatttttagttttaaatatccagggcgatctgcaacttcaaatagcttctgttttagcgttggatacacctgccaatactcactcaacgcctcaacgtctcgcttcggaattccccccaatagatgcgcctcaatatcctgaatatcctcctcttcctggctatcgatgtagcgaggaatattcaggttgtaatcgtttttgggatctgcaagttcttcaaatggcatgaagcgggaatacttcggaatttctagctgccggttaaacacatcaacaattttgtgaatatcctgatcccgcaatcggttcttattgccatctttgacaaagcccttgctggcatcaatcataaaaatgccctgatgctcctcggcattttccttgtccagcacaataatgcaggcaggaatccccgttccataaaacaagttcggcggcaagccgataatgcctttgatcgcacctttgcagatcaaattcttgcggatttctgcctcagcattgccccgaaatagaactccgtgaggcagaataattgcccccttccctttacctttgagtgactttagcaaatgtagcaaaaaggcatagtcgccatttttcgccggaggaatgccatcctcaaagcgcttaaattcgtcttgaaccgggttaaagccgttactccaagcttttgaagaaaaaggcggattagcaacagcaaaatcaaattgtttcaggctcccatctgcttctctaaacagtggatcagccaacgtattcccttgtaaaatctctgcggtaggatgcccatgcagaatcatattcatcttagccagggcgcgagtggcgttgtccatctcctgcccatagatggttaacccccgttctgcttcatccgccgccttcagcaacaaagaaccgctgccacaagtcgggtcatagatagattgctcctggctttcggcagtattgaccccaattaccttagaaataatccgagacacttccgccggagtataaaactgccctttgcttttccccgactgggtggcaaagttccgcatcaggtactcgtaggcatcccctaacagatcgtccccatccgcccgatttttactaaaattcaggttcgggtcattaaagatagctaccaggttagagagacgatcctgcatctccttacctttgcccagcttatccgcatcattaaaatccgcaacatcaataatgcccttcaggtcattcgcttccgcaagtttggcaataattttattgattttgtccccaatttctttgtcgcctttgagcgccacaatatcctgaaagcttcccccctgggggacttcaatcagggcatcctctacccctgcatagcggtcagaaacatatttaacgaacaataacgccagtacataatctttgtattgcgaagcatccatgccaccccgcaactcatcacagcttttccatattgaactgtagagttcgctttttttaattgccatcttgtgttgcctacaatagcgcgtgctaggttctccctgctagacacctctagaacgcagtcaatgattctagctcgaaccacaagcagccagcaaagagccagtaatatttcacaatatccaaaatctacaaacatctcagcttactgagccgagcgtggacagccaaagctagagactgcaacaactatcaagtcaccgattttacctagtgacctcaatgcctgggtcattcggacagtaagcgtaactgatggcgatcgcctcccgaaatcgctggaacccaaactttcccaaaagcgcgatcgccttccgtcatcctaaatccaaaaattgctgctcttgctaactggatcgaggcttctccctggtcggttcaggtacgcgagttagggtatcgttagggttcatgcggacacaagggagatttgtattttcacgctccgtgtagcgatgctaccgcgaaccatgattgagtatgtggtggttcacgaactggtgcatctgattgaaccgcatcatactcatgcgttctgggatagggtgaagcgggttgtgagtgattggtgcgatcgtaaacagtggctagcggggaatggagtgagttataacctttatggatgagaagtgggagcgatcgctttccgttgaggaaataagtagtagatgtggaaataagtagtagatgtggtaaaaagccgctctttgctggagttttacagcacgcgcaaattaccaataatatgattgtccaagctgcgtttgaggagatgatgcgattaatggatgcttaacaacgaaatgaaattcgacagttgctctcattagtttcattaaagcagtcttcagggcaggtaacaaaagttgcttgacttagattttgcaggtgtctagataccctactgcgattttagccggaaatgtaccttactttcggttctctttctttagctaaatttatgaggtgacgtaatgattcaaaaagttctgtttccacgatgggatagtttatcttcaaaacaaaaggagctagtcaagaaatgtattgacgcaactataaaacttagggcagctactaaagagttatcagaagctttttttccagatgatgatgaggaacatcaatctaagcccatagataatttattagaaaattttatatttgaagttgtagactcttcaactacttcagaaggaatcagacttgaggatattattccaccagcactacttaattcggaagaaccagtgcctaatggagtatgccaattcaaatgtctgttttatcctgactttgctaagtgcgtaagacgttgtaatacaaaataattttttttcaagatatgaagataaaaagtttttccgaaataagtgaatttaaatgatttagagggcatggcttgactgaatttaactataataatgctcaatttcgaggaattatttttagtaaagcaaatcttgaaaaagttagttttaaaggaataaattgtggagttggctcaggctggaagcttttcttgtttttaggcatactaactttagcacttttatcaggttctgtccttggtgcaggtagttcactttcagtcgaattgctaacggaaatttctccctcaattcatggaatattagtcctaatatccttactatgtacattatttatcgtttcgcaaaaaggatttttacttggagtcagtataggtgtagcaacactgataccgtttttgattttatcaatatttcttccggtaagcgaagctgattttgatattagcctctatttttttactggtgctggctcaatagtgtcggtggcttttggtattgcaactacagctttatcagtgaccctggcggcagttgttattgagtctgttactgtagctacaatcactgtgttcattcctgcaattataatggctgctgcaactgcacagacgtttaaagcaatgcctatagttgttatagctgttgcgtttgcaagctattttaattggaaggcaattaacggtgatcaaacatttcaatggatatttcaaactgcggtcgcaatagcaatatggaaaggcaatctctttgaaggggcaaatctaactgatgcagactttaccgatgcagtgcttaagctctgtgatttaagaggagccaaccttacacgcactcgattttttcaagctagaggacttgaattttcccgcttaggaaacacctatctggaaaaccccaaaatccggcaactggttgtcacactgaatggacaagctcaaaactttgagggcttgaatttggaaggggtgaatctccaagatgcaaatctgcaagatgccagttttattggggcaaacctcaatcatgctaatttgcaaaaggctgatttgtctagagcaatcctgaagcaagctcaactggatggtgcagaccttactggagcaattcttactggagcttgtatcgaagattgggggcttacaggtaccaccaagctagagggtgtgcaatgtaactatgtgttcatgcgtcttgagacaaaagataatcctaaccgactacgaaagcccgataactggggagaaaactttgctgagggagaattttctgatttcattaaaccttacgtcgatactctagatttgtaccacagccaggatattgatcctcgtgccatttccattgccctcaaaaacctgtcagccaatcatccaggcgagaaactaatgttggtggcgatcgaacggcgaggcaacaatggattgaacctcaggtttacaacggcaccaggagcagacaaatctgagttaagtcacgagtattttacagattatgctcgaattaagaaggaattgccgatcgctgttcagttaagactggctgaacaagatgctgaaattagcatactcaagggaacaattgagcagtttattgaagcaggtacgcatcgatctaaaattcaggccgaaacaattcagatcattcaaggagaattggttatgacagagaacaagggaatcaacatcacttcaggcggtggtagcattggtgacatcagtggcttagttggtggtgatgccagtggagtcgttaatcttggcacgattagcggcaatgtgaccaacacgatcaatcagttgccagatgcgtctgaacccgatcagcctaacctcaaagaactcctgacacaactccaacaagcgatcgagcatgattctgacctatctgaccccgacaaagccgatctgttagagcaggtgcaagttttggcagaagctaagcagacagaggaacctgcgaaaaaagaagggttggcacgtaaagcaaggaagatgtttgaggcaacattgagcagtttgccgcagactgcaagcattgtagaatcgtgcagtaagttattgccaatggttttaaaggcattagggttggctgcgtaacatcgcagtatttgcttaaactgccagcccatccgatgatagggcgacccggcatgagatgcgatcgctcattcattccctgccaactttgacagcaacgcttgccatacctcaaggaagctgctgtaattgctgaaggcgatcgccctttgcaggaggaagggatgcgatcgctcattgattccctcccaacttttccagcaacgcctgccatacctcaatctgctgctgtaattgctgttcgcgcgatcgcctgcgcccgattttagatgcacagattgctgctgttgtcaatcgtattggcgcttctcctcggtcggtccaggtacgcgagttaggctagcgctggggttcctgcggacacaagggagatttatattttcacgctccgtgtggcgatgctgccgcgaactctgattgagtatgtagtggttcacgagttggtgcatctgattgagccgaatcatactactgtgttccgggatagggtggagcggattttgagtgattggtgcgatcgcaagcagtggttagcccaaaatggggcaacttacaatctttagggatgggtagagacgtgggagcgatcgcagttgtaacccactcatttcactttgcccttactgaaatagacattatccgctttcccccttgtaggttgagggaaagccaagcagttacttcgtttcaggtttctgttctgctctatcaggaaacgaacactctactgtaatttttaggttacttttagccgttccttttgttacgtaaggaacacctgcttcgccaccgagttcgatgccgaactctaaggtaactttatctacgtttgcgatcgcgactttcttaaacgcactcaacgtgtagaccgtgtaagcttgaatcgttttgctaatcggtgcaaaattctcaataaccttcttttggagttcagcaggatttactggccctcttttaatgggtttggtttcctgggagccggtcgcttcgccgtcgctggcttctaagacatccacctcttcagtaacttctatgtatatgatggtttcgtcatcgagctggatgggtttgagttgagccatactaagaaagtttgattcttttctatattctgtaaaaaacagggtgagtcagagccacaaaatcactccttgacaggcgttttgcaaattggctaccaatgaggaagttggtgcatattgtatcgtattgatgctatacgagccgattagccgatcacatcatcaacttgagaatgattgcttatgagccgggaagccctggttgttggaattaatatctataagaaaataccaggatttgattctttgaaaattccctcagaagatgcggcagggattgcccgaattctggcagaggagggggacttctcggtgcggcagttgcctgaagcattgaaggatggggaaattcgggttggacagcaaggcggggtgactcagaaggaactgatagacgccctgaagcaattatttatccccaagggcaagaatatcccagataccgcactcttttattttgcaggacatgggattctttcagaagagggtttagttccagaaggctatttagtaaccagcgatgccaatcctgccgagggcaaatggggtttgtctcttaagcagctacgggaactattggaaggcagtgaggttcgacagcagttaatttggctcgattgctgtcatagtggagcattgctcaattttaatcaagccgatccgaaggatgcagggaaggcacgcgatcgctgtttcatcgctgcatcacgggagtttgagccagcctatgagcagcttcagggcaatcatggagtcctgacaggcgctttgttacaaggactaaactctgagcaatgtccggcggggcagtgggtgactaacttatcactggttaattctattcatcaggtgatggaggtagatcggggacagaggaaaatccctcagcgtccgatttataccatctttggtggcgcaattaatctgattcggggacgggcacagcctgagaaagctctaaaaaatgtggtttcagaggaatgtccctatcaggggttaaaggcgtttgaagaggagcaaaagcaattcttctttggacggcagcaggttatcgataagattcgacagaaactcaatcaaaaggcgtttgttcctatcattggggcttccgggagtgggaagtcttcagtcgtccgtgctgggttaattcccttgctcaaggaaacagaaagtggctggcgggtgttaaaaccgattaaaccagggattgagcctttggcggaattgagaggagcttttaaagagttttttcagggtgcaaaaaaagagcagcaactttatgcctttattaaaaatgacccggaaggcttacttaagctaattgagcgtctccccgatgcagagcggttcttgttagttatagaccagtttgaagaagtgtttacagtttgtcctgtagaagaggacaggcagcgatttattgagctaattactcagatgactgagattgacgattcccggttggcagtggtcacgacaatgcgggctgattttctggaaccgtatttgcagtacgaatccctgacgcagctaatccaaaatcaagcgatttttatgccgccgttgatgggtggagacttggagaaggcgatcgcaaaaccagcagaacttcagggttatcgcctagaggatgggttgctgggtgagattctcaatgatgtgaaaggtgcggggagtttgccgttgttgcagtttgcgttgacggaattgtgggagaaacgcgatcgccaaaaccatcagttaactctagagcaatatcaggtgatagaaggtgcgattgggtcgctgaatcgccatgcccagaaggtttacacctataaggatttttcggaagattctccgacagaggaacgaacaaagcaagagcaggaatggattaagcggatagtcttgaagctggtgcgaacgggtgaggaggagaaggatacccgtcagcgacaaccgaaaggcaagttgttggctattgctggagataacccagagaaacgggcggaactgaatgaggtaattgatgagttggtgcaagggcgcttgttggtgactggggaagcccaggaaaaaacagacattgctgactcggttgaagacgccaaaatgattgatttagcccatgaagccttgatggaagggtggaagcggtttgccgagtggcgtcaggaaaatcgtcaattgcgacggttgattgatcggatggaggatgccctgcgggaatgggagaaacagccaaaggatgagaatttaatgatgggtggattgctggctcaagtgcggcaggaatggcaaaacttagaacccgatctagagctgacccttaaggacttttaccaacgcagtaattcccacgaacaagaccgcatcgcccaattacagcaagcactgactgaatcgaagctgcgagagcaagcggctagggtgcagaatttactgccttttcaaccattagatggtttagtgctggcaattcaaacaatggggttgaatttagagcagttgagtgaagagaagattctcgctcccgttcaggagagtctcaatcaagcgatgacaagggtaggggtgccaattgccttgggaaggcatgaggattctgtcagttcagtcgcctttagcccagatggcaagttcattgtcagtggtagtggtgacatgacagtgcggttgtgggacatccaaggcaacccggtgggtcaacctttccaggggcatgagagttttgtccattcagtcgcctttagcccagatggcaagtttattgtcagtggtagtggtgacatgacagtgcggttgtgggacatccaaggcaacccggtgggtcaacctttccaggggcatgagagtattgtccattcagtcgcctttagcccagatggcaagttcattgtcagtggtagtggtgacatgacagtgcggttgtgggacatccaaggcaacccggtgggtcaacctttccaggggcatgagagtcttgtcaattcagtcgcctttagcccagatggcaagtttattgtcagtggtagtgatgacatgacagtgcggttgtggcaagggggttggcgggcgtggcttgaagtctgctgtaaccgattacgttaccgtcctgtgtttaaaaatcctcagactgaggtggagaagcaagcctgcgaaacttgtcaaaactatgtctggagtcgagaggagagttaagagtaggggttaggggagaggtgcgataaccccagcttcagcattcttaacgacagcttgagctgtggtgacaacgggtaaagcgagactaacaaaacctgcttttcgtaaatgcgattgctcaacagtcgtgcaaattttaggaactgcgatcgcaattggcaacagttagatgagttgcgattctattgtgatgaggtaaagatgcgatcgccagaatggatgacgtggggctgcgatcgcttattgattccctcccaacttttccaacaacacttgccacgtctcaatctgagaagtgtaattgctgttcgcgcgatcgccttttgtctaatgagtgcgattgctcattgattccctcccaactttgaccgcatcgcttgccacgcctcaatgtgcggctgtaattgttggatgcgatcgcattttggcaggatgaagggatgcgatcgctcattcactccctcccaactttttctgtcttagcaagagagcaactacagctagaacctttgctgattgatatttgaataaaaataacctgagtgtggagattagggttagtttgccttaatcaaatattcacaaactcttagctcaagctttaccgtcgtattgaattgcatctcatcccgaataagtattcattgccaaattaactaccaaaaccgctgatattacccctcaattgttgatgaatgggagcatctttacccttccaaacgcctttaagcataaatccttatttatcctaaacttctacaactttaattctagactaaaattcccaaacaaaatctcccccaattccttaaaatctgacccaagcaactgggatacactaatctttgccttctcacacacaggaataattattttcaccaaatgataaggttgattttgattttggtttgaagctatcctcaaagattccatgatcccgcctaaacctcccaataacttcaaatcattcccaattgcttgttcaaacactaacaaaatcaattgcaatctgcgggttaaatctattggaataggtttgtatcttaattggggagtaattgcgattaattccttaattacttgaatattaattcgatatttttctatttcttcttcccctttaatctcctgtcctaaccatccataacaacgagaacaaaatccagcgggtgaaaacctagctattacaggcagacgcgaactacaatgagggcattcttgtattaatcgctgtttgtgaattaaacaaacttctacatccttaaatgaccataataatggttcatagatagttttgttttcctgcttaccctcttcccaacaacaaggacaccaagcgcgatagttccgaaataaccccttgtcataaatcattcctttccagcttaaaagggtcaaaaaacgtaaatcctgacgcattgttaactcttctaagacagctaccaactttcctgtcatttctcgcattccgttgatagtcggtttagcatccctatttcccaataggtgactcagattttttgccaatagctcagatttatcctcatctttgaggataagtggcgcaatttctcccataacgagcttttgagaggttaaacaatgcgcctgcgctaaacgatggagatagctactaagactttctgcgtagggagttcccaccgccacaggttcaagagaaaataaccgactccgttgcgggatttttataggttttaggttccaatgttctgagtaaatagtcatccctcttggattaacctaaacactagtactttagttttaaaagctaaatttcaggaattagtttccgattcagtcttaagctcgatgccgtaattaacaaagagatccgagacagatatctccaaagctgccgctaacttgacaatattttttaacgaagggttgcgctctccgttttcgatacctgagatgtagttgcgatgaagccctgacatttcagccagtttttcttgggataaatctagctctcgccttcgccgcctaatcgctttgccaaagcggtactcaatactggagtgtttctgcgtcacaaaacaatactgaaccagtatcgccgttaaatccatctactatcggtgaacttttgcacattataagtgttataaagttaagtagtatagcatcagacaagcaagtttctaactttatggtctgattttgatagattcataaaataaagcgcaaagtgcttagtaaggactgatatgaaagagcaatttgaacaatgggttgctcgccttcaaatatccgaggcagggcaaaaaattgttgagaaagttcgctcatctgagccatcccgtcgcgttggtggcggtagcaagaatgtttcgggacgctaccctagtcgcaagatgggagtcactattcaatttgagtctcatagggttgaactgccaattatctatcagttagaacacgatgaagatgttctagaattctacgatcaaccaccacaaattaaacttgactatcaagcaagtaacggacgtagattaggcgttttacacaccccagatttctttgtcatccgaaccaattcggctggttgggaagagtgtaaaactgagcaggacttgaaaaaactagctgagaaaaaccccaatcgttacttttactctcaagaagataatcaatggcattgtccgccaggagaagtctatgctagccagtttgggctttattaccgcattcgttcagatcgcgaaatcaattgggttatgcaacgtaatctgcaatttttagaagattattaccgagccgaatccctagtagtggaagaagcgatcgctcaatcagtgatctcaattgtttcatctcaaccaggaatcactttagcagaattactcaatcggtcaacaggagctaaatctgacgatatctacaccttaattactcaagaccaaatccattttgatttaaatgctacaccacttgcggaaccagaaagatgtctactcttccgtgacgaacaaactgctagtgcttataggttaatggttgagcagccaagggcaaatcttccggctatctctcctgtaatcaatcttgccactggaacgactgttagttgggatggcaaaggtttaaatatcatccatgttggagaaacagaggttgtacttggcgcagaaaatgatcggttaattgaactcaaaaaagctagatttgaggatctggttcgccaaggaaaaatcacaagtctccaaacagcagaacaaacagctattagcacagaatcttggcagcgattttatcaagctagtcctgaagaccaagcagaagcccttgaacgctacaaaactatcgaaccttacttaaacggacatcccccagaaaacgaaacaataccagcccgtaccattcgtcactggaaagctaaatatctaactgcacttcaacaacacggttgcggctatattgggcttttgtctcatcgtagtgtcaaagggaatcgtcagcgcaagctgcccgaagacaccttagcaattatggagaggtttattttagaagactacgaaactctcaaacaaaaaagaatgttggaggtttacggggctttagttcgagcttgcgaacaatctggtgtaattgctccgagttacaaaacatttactgaagaagtaaaacgccgtactggttacgaacagactaaaaaacgccaaggtcgtcgtgccgcttatcagcatgaatccttctattgggaacttacccaaactaccccaagacacggcgatcgcccttttgaaattggacatatagatcatactcagttagatgtagagctagtttgctctcatacaggtcgcaatcttggcagaccttgggcaacatttctcgttgatgcttattcacggcgattgctggcagtttacctaacgtttgactcaccctcatatcgttcttgcttaatggtgctaagaatttgtgtcaagcgtcacggtaggcttccccaaattgtagtggtagataacggtgcagagtttcacagcctttattttgaaacactactagctacttttgaatctacaaaaaagcaaagacctccagccaaagcccgttttggttcggtttgcgagcgcctatttggaacttccaatactcaatttgtccacaacttactcggtaatacacaaataactcgtaacgtccgccaagtcaccaagtcagttaatcctaaaaatcaagctgtttggacacttggtttactttatgaatatctttgtgcttgggcttacgaagtttacgatacagatgaacatccagcgcttttccagagtccgagggatgcgtttgctgcgggtatggcgattggtggcagtcgagttcatcgcatgattccatacgatgaaaactttcagattattaccctacccacaacgtcagagggaaaagcaaaagttcaagttggacgcggcgtaaaaatcaactcaatttactactggtctaatagtttccgcgatccccaaattgaaaatacctctgtgcaaataagatacgatccgtttaatattggtatcgcttacgcctttgttcgaggacagtgggtacagtgtatctctcaatattatgcagaactccaaggtcgttcagaaaaagaactgaagttagctagtatcgaattacgcaaacgatcctcaaatcatgcacaacaatctaaagtttcagctaagaatttagcaggatttttagcatcgatagaagctcaagaagctctattagaacagcgttcctatgatgcagaagttaaggaagttttcagagtaattgagggcggaaaagcgataataagccgtaacgaacaaccaaaggttattcaagttccttttgaaaatactgatactcaagtggctgaagataaagcgatcgtcccagagaaacttgtagtttacgaggagttttaattatgacaaaatctactggatttccgcttgaactgctcaaactacctactccagaaaggcttgcctactttgagaattacacagtagcgcatcctcgacttaaagaagtctatgaaattctcatgcaaacaattgtggaacccgcaggagcttcatttatctttgtttatggtcctagtggtgttggtaaaacaactttgcgacttcgtgttgagcagaaattaacagaactagcattacctaaactggaaagcgatcgcagttgtgttcctgttgttggtgttgaagctgtagccccagaatcgagaaacttcaactggaaagattactacacacgcgccttaattgccttagaggaacccttaatcgatcacaagtttaattacggtgtacgtggtatctctcgcgataattttggaaaaattaatattgaatcgaaagtggttgcacctgctctacgcagagctttagaaaatgctcttatccatcgtcatccagacgtgttttttgtagatgaagcacaacattttggcaagatggcaagcggatacaaactgcaagatcaattagactgcctcaaatctctagcaaatatgacaggcatcttgcactgtctattgggaacatacgaactactgacatttcgtaatttaagtggtcaactctcacgccgtagcgtcgatattcatttccgccgttattgtgctgataatccagaggatatacaagctttcaaaagtgtattattaactttcgagcggcaaatgccacttgcagaaactccagatttagttagtcattgggaatatttttacgaacgaactttaggatgtgttggcatactgaaaaattggctaacacgcgctcttaaagatgccctggacaaagaagcaacaaccgtcacactcaaagacttacaaaaacgtgcttggtcagttgctcagtgccagaagatgtttaaagaaattcaagaaggcgaacgacaattatccgaaacagaaacagatgtacaaaacttacgctctcttttaggacttggaacaaaaccaatggggctacccgaagaaaccccaaaaactactcgtccgccaggaaaggttggcaaacgcaaacctaaaagagatcccatcggagtgcaacaagatgttagctagtgcattagaaacatacgaatcttgggatttaaaaaagttttctattccatctcgcagtcgtttgtatcaattacagcctgttggtattggtactccattagttgaaagtttaacaggatacatagctcggctagctcacgctcattccgttctaccaggagttttaatggagagagaattagtaccatttgtaaaaaaaaataataaacatgatagttcagagtatttaaataccagagccggagtatttagccgcataggagcgcttaatagtatcggttgtatggcagcaaattgggtggaagcattagaaacattaactttacatcacgatctccgtttcctaacaatgcttacttggagtaatatttttccatcacgaggtttaatacgttctaattgggcttattgtcctacttgttatgaagagtggtactcttctgatcaagtaatttatgagcctttgttatgggcaatcactcaaattaaagtttgtctccgccaccactgctttttgcgctttcaatgttatcaatgtagtcagtcacttcctccactaggttggaattcaaaaccaggacactgcccaagatgccaaaaatggttgggtatttctccagatgttaagataactgattctgaaaccttaaatgaagaagaatggcaaacacaaatttggattacacaaagtataggagagttaatcgctattgcgccaagcttgtcatttccacctaccaaggaaataattcctaaagctatatcaggttatataaatgagctaagtgaagggaatatagctgcatttgcgcgactgataaatttacctaaaaatactgtatggatgtggtgtactgggaaagccttaccgtcaatagatattcttgtaaaagtttgtcaagaattgggaatatcaataattgagctgttaaacctagagcttgttaatcaagagaacgactatttgaacaagttcaataaaaagagtcaccttcctaaaagagatgtaaaaactcgccgaccattcaatattcaaaaaacgcagcaagcactagaatcattgcttaacagtcagcagtatccacctccatctatgatggaagtagcgaagcttcttgaatacgatcctcgttttcttcgcaaacatttttcagatttatgtcgtgctatatcagctaagtacattaattatcaggaagcttcctataaaaagaaaattgaacagttatgtattgaggtcaggcaggcagtgattgaacttcatgctcaaggacagtatccctctaatactcgtgtctcaatgtacttaaaacaaccaggagcgattagaaacaaagatgttcgtgctgttttagaacaagtccgttgtcaattaggagttggcaaaaataaagccgatgactgaggcttgtactactgttttcgctcatcggctgaaattgattgaatattccagagaaactttgtttggctggaggactacttccaagtcaagttgccacaagtcgatgaggaggtgtctcgtgccctcctttccattgtcgaagccgagccaggaattgccctagccgacttactgaatcgtgttgagccagctaaggtcgatgacctgaatatcctgattgctaccgagcgagtgtacgttgacccatacttctcgcgacgtggaagccttcttttctgagttggtggagtccgcccaagaacttaaggttgaggataaacgtgcgatcgcatctcgttccttattcggaataaacctggcacgggctggaggattaagaacacagcttaaaattgagctagtggcaaacgagagcagatatggcagaaaattgagcaagaaacagcttatccagaggtggaacacaacgagaggacaagacatcctcactcgctggaagacgaatgactttgactgtcaagttttaaataatctggtgggcaagtctacggtcacaccgacattcgaggtattgacttaagcggctcggatttaacgagcgctgacttgaaaaaggttgacttgttcagcgccaacttggaaaagaccgttttcagatttgccgatttgacaggcacctacctttcagaagcaaacattaagagggcgtgttttgattgggcgcggatgaaaggcgtgttagtggacaatgtggattttgacgtaaaaccagctttgtcggcgtcaatctgaacgagatcaacttcaccttagctgcgctcattcaagagtcggcgctggggcaggcgagaattattaacctagaacggaaacgcccaatccttgctgccttcttgaggatcagctgcgactacgggcgcttgttcccccgcttcttctcctggtgccttgctgtcatcatcgccttcactttggcgtataactttctcccaggctctctagttagggcagataacgtgactcctgctgggggattgtgggatagcttttatttctctgcgacaaccttcgcctccctttcatctaatcttcagcctgcctctgttttggcgaaggttttggtacttgtcgaggcgacgattggctacctgatgaccgggctattggtggcgattttggtgaaaagaacgattcgagattagaggaagcgatcgcttttttacagcgaacaaggtggggcaaaacggcagtcaaaaacgctcaaagcgttgcaggacagggagcttttccggcgaacggatttaagtcaacgattgattaaactctccctcgtatcctctctggcaggctaacttggagtttcaaacgattgtataaattaaccctaggatcggaatgactaatgcaagcaactaaggcatagcgttgcatatcaatttcatctggctttgcccatttgcgattacaactcacaaccaggtacatggaaccattgtcataaccctttgatttggtaatttcgatttgtcctttttgcaaggtccccttttttcgcaatttacggcctggggataaatcgacagtaatgccagagccatactttttctttaaatcgcctaaagtgatttctgcaaaccgctcaggcgaagctgttttactagcatttacataaacattcactatactttcacgagcaatccctttgaaaagattgaattccattgtgactcctaaatatgagtctccacgagtcggtcgagtaggtgggtcaaatgctagagcaatcgataaaattcgcttgcctggtgactgaaaaaactcaggtgggagtgggggaatctcatagatatgaaacttaccgacaggaattaaaatattgtcttcctgaagaattacatagttttcagcggaatacatcgcacgttgcagatcgggctgaccgtagccataaatcgctagttgcttattaatttgttctgtttttctaccctgaaactccggaggaatttccctcggtaaggcagcagagttggcgatgagtgcccgaattagatttgagctggcatccgggtatttagtaaaaagttgagcggctaagttggcaatacgaggagcagcaaagcttgtaccactgcacatgtgaaataaagaggcggaatagtccttagccaaagtcaggacagaaacaccagctaaattatctggtaaaaaactagattgaggtaaacctataccttctcgataaccgaggctcagcactaagtctccaccaaagtccacgacatcgggcttaatcatgccatctaccccaaaaccagttctggtaaaaggagaagggtatcccgataattttgcaatagtctgataccgcacatcagaagggtctgtgatactaccacaaccaaaagatagcgacccaactgttagtgcgattgcagaagttgccggatcgataattcgggcacttttgttttgcagataattttggtagtcagcccgcagctgttcgtctgatttcgcctcttcataaaaagcatttcctgctgaaattacaaaaacaatattcttgtgttggtacttgtaagcaagttcatcaatcttagcggctagcctaaactgtctcagcccatctctgtaaatttgattagcgttgcctagtgagatattaatgacttggcagtttggatactcctcaataaaggcaagaatagctgcactaagttgagtttctaggaggatattttcgtcatattcgcacttttcgtttgtcacacgagcagagaatagccaagccgttggatcgaatgaacgctgtacaatgcattttttaatgtctccatagatggcaattccagcaacattggtgccatgcccgtttacatcatcagccccgcctttgataaattggtgttgtctgtcagggaacacgctagcttcacccagggccggagcaattaatggatgaccgcgctgtacgccggagtcgatgacgagaacaccgcagtggtcttcaggtggaggaatcacttcgggaataacggaaagtggtagatcgtagtcagacgtgtcctcaaaggcaggttttggacgacgatcaatttccttgacaatttcctcttgtaataaaagttctaaaacgtcgcgggtaactttaatccgagcgatacatagataatcgccaatatagcgatcgctcattcgcattggaatggtatcactagacaagcgttctaactcgttagcaattttattcagagattctttcatctcattgcgatcgccagtatgccaaagctctaagtctaggggagctagttcttccgcttgaactggctctagttccaacaagcgaccaatgcgatcttgtggttcgaggggaaccagcgcatcgattgcccccaagtattcatacctgtgatcggttctaattccgctgtagttctctaaccgctttttgaattctgtaagttcattgtcggatgagaaaacgacgattgctttattgtgattcggttcacgcgccagaacagtcagtcctgttttagccaactcgtcttctgaaagattatgttccttagcaactttaatcttgaaaattaatttgggatcaaggcgaaaggaactctccttttgcttaataggttgaatcaggttagagaattgttctaatagttgcctaccgtggatgctgctatcaaaacgcttcgtcccaccaccaccgcccgtagagcgcgtcggaagttcgatattgatttttggcagttttaggtgttcaaactgactcactatttttgctcgacgtagagaattctgttgagtttgatattatacgttgtctatctagatagcgcccaatcgcaacttctaaatcatcagcagtaagagtgcgctcgttccgcagaattacagctttaattgcatcagcacagatgcgctctatgtccgccccggtagcattttcaatctgagcggcaaaaatagatagattaattccggtataacgaatggcagataggtaacgctccaaaagcgccgtccggagttcaacagatgggttatcgaacaagagaacttcatcaaatcgtcgccaaatagcactgtcaagtagtttctcgtgattagtggctgcaataaatagaccattactggtcgaattatcaatgagctgtagcaggctgtttactagacgtttaacttctccatgttcattttgggtgttgcgatcgcgagcaatagcatcaaattcatcgaataaaacaacccattctcctttctcaatataggcgaaaattttctgaagattagtcgccgtttcgcccaagtaagaagagaatacagccgtcagattcacataaacaagcggcagtcccaatacgctggaaaggacttttgcggtttgggttttgccacagccaggaggtccgcagaaaagcagcttgtttttgggtctaaggttataggctgcgaggatatcttgcttccgagtttcgaggacgatttcttgcaggatatcaacgatcttttcactgaggatgatgcgatcccaagtgagatcgaattgtttcacctcaagcaaagagagtccagtttctttatctttgggcaattcaggaaactggttccagggagcaatgttagaagccaagcgct

SEQ ID NO: 885 - DNA, 29202 bp, unidentified
  misc_feature 1..29202: note = Synthetic
  source 1..29202: mol_type = other DNA
gcgattcaggcgaccgtaatttatgctgtcagcagctacgacatttcaaggttttttggatgtgcgctcggtgctttgctgctggacatcatgcttaggaaaaggctttactggcaacgtgatctgctgagcagcagcgcaacgcgatcgcaaaccagcagaaatttgccgggcatctgtgcgaggcgaggaaagttcaccttctcagccaaaacaggtgatctgcgctgacttttggagagtcgctttccagagagcagcagcgcaacgcgatcgcgccagattaaattgcctcctagcagctaattctcaaatgagggaaataagttagagaacgtaacttttctggatcggatgaaagtgcgacaagaccctgacacagtctgtccaccaccttgtccattgatttcaagatacgattgtagaaattttccctgctgtttctaacgcagttactcccatctggttgtactgggagatcactttatgcaccgtagctactgatacccctgtttgtttggcgatttgtgcagcgggtctggggtcaaccaagccattgtaaacaattagccatttttgtctgtgccaatagctgcgggctgatttgagcttctgttcaacggcttccacactcaaatgagacgctgccctactcactcgactcataagcttacattattcatgactctcagctctagattctacattagactgcaacttggtataagccacaacaaacgccaagcgacaattgcataagtcgccaaagctttctccaagcgctcagccgtttctaattgcagttgctcgagccgacaaccactcttgagaacgtagtgataacgctcaatcaaccaacggtaagagtaccaacgcacacagcgaacagcatcttcaaagcaatcaaccgtcagagttgtcaataacaaccaactaatgggcttgatgcctgctggtggatgttcttcatgagcccagacgacattgacggcaattggttgtcgctgtgagccttggcgagagtgtcggggcggctcaatggttaaccgagccaagcgaattgtcacagtagcgctacgggaaggtcgctcatctttggcaggaatttctacaagtagttgaccacaagggtcagcctgagcaatcgcctgttgcaaatattgactttcatggtcaacacgacgattgtgagcggcacggatgagtaaatgtgaattagctgctcgctccaaggctaacagctcatagatatcggcttcacagtcagccacactaactactgtggtagtttctggcacggctaattctgtagccactaagctgctgagccagcgcttgctttctttgtctttgagtggtctagtacggcgctttttggctttccccttgtgtttggcgtccctagaccacacttggtggtgcagtatccctagcggcactccttgcgttgttaccccaaacactgagtggactttaagtcctagcagatagtcttgagcactgatggctccgaacccttgggctggcgttttactcttgtgatgcgtgaagtttagatccgtggtgtcttgtatcgccaaaatcatctcgtgttctttggctctttgtgttgcactcatttgatgggcttcgattatggcagccgcttcaatccgctcacttcgccaaaatgcataagtcgctttcgtctgtgcccaactggaacttgcttgggtaatactcgcctgcggttgagctgccaggttttccacaatcttaatcaagcgtttattgagtcgtgcatctcctaggtcggcgtatttcagttctgaccctgcccaagcttgcatcgcttttcttttcctctactttcccgcacagagtttataccctggtcacggctgctagctaggttttttccctgtgtgctgcgtttttccagaaaactctttctctacaaggcttttaccacttatgggtaaagcatagacctttataagggggggttggggggtgtgaaatgtgacattgaaaaagccaattggtataatgcctcctgggtaggagttgagagttaccaggtagccagtagaaagcgcgatcgctcttgtggataagacctcagagttgacccttaccagcgatcaagaaggtgcgatcgcctttccctaaccccacacggatttttccactcgctaatcaatgaataaaaaaagattggagttttgtcgtaagtatccgtgtgcaaacaatgtggactaaagaattatttctcaacagttaaagaactcttctagggagagattaacagattgatttacccagaaatcgtagagagcatccctgcctagtttaaaaaagggattacttccttgcgactatacaagttgcaactgggtaatctggatgaaaatcatttaactcatcaagcgataactcttctgctgaaattcccataaaactagctacaactgtcagaggatttccgtaaatatatagcttctgttcggagaaattttgaaataattgttttattccatccggaagcagtcgccaataatctcttggagcgttatgcaatctttgggcactaggtaccatgcaaaaacactgacccctcactctcagccagctgtaaatattttggacaactacccgaggattatgacaatgttccaacacattaaagagtaccaccgcgtcgagagattctggtttgagagccgctggctcgtgaacatctccgaccagggtaactcctgatcctgctgctacatccagggtcagatatttagttgcattagaaaactgataaagttctcgatttagcagaactccacccacttccaatacagttcctgtcacttggggtctaatttcgctaataaattgacctaaataatatcgatcaataggcgtccctctggtaaacccaaagacagaacataagggaactcttcgcctcaaatcaccccaatgtaatgtacttgctgtcggggagagcagacctaatgtcgctagatattctactaattgattaaactcttcaaaactgctaatttcatcttcatcggctgcaaaaaattcctggtagaataggcagcaaatcacttgacaagtgtctttactaagtgcatctaaatcaatttgttgctctgggttctccaaactaataaatccctgtttaagaaccttcaaggctttattatctaacagaatcattaaatattctgagtcattacgagcttgtttacactgccgtaacacactctcggaaaagggtaaagaattaatttgcacgaagcgctggtacgctgcttctaaagattgttcatgaaggaaaatttctaggatagtcaaccaagattttttgtcaatagtctgggttttattctgattccagtcaaatcctgccaagactttagaatcttttactgttaaaaagggactagatacataaaattctttcatcaaggttttcctcggtactaattaagcaactcaaatattcggacttaccatgaccttggcttaagttgggctggcgataagcccgaagggcatagcgcaaagcgcatcgcatgtgacagttgcataagtcctgatagctaagaccataacaatacaaaatagctgttaacaggccggaagcatcgctcccagacgcaggctaaatctaaacaacatactcggcataaatcaaaccgcgaccgcaaagcctctcgccattgagcaaaaagttcacctccacatccccactcacctcctcaataaaactatattgacgtgatcggttatcaggaaccaccaactccatcgcgctatcaaaacgcactgaaaccgacaagtgatcgcgctcgtcaaccgcttccacttgcaaactctctggcattggcaaactgcgatgggcaaacaccgaggccataatccccggtaaccgcattggtaataccgccgtcgccgaccatccccagtcgatctgcaaggttgcgcctaaaaaaatcttccgcaactggttccccaaataaacgaatacataagatagcccccactgcgaatggtctttattagtccgtcgatctaaaaccagagtcaacgtttggccatcagtgcaagtcacaaaggccacaaaccactcccaaccaatatcctctccccagcgaaaccgaccgaagttgcgatcgtggtagcaaaaccagtcgcgatggatgacaaaactctcttggccaaccgacaactctcccaccactctcaagcccggcaccaaaccccaaccgatgaaaccgctaccgaaaggagaatcttctgttaccaacagcggtgtcgcttcggattcagcttcaaaggcgatcgctaccccagctctctcatctcgcactgccacccacaaccgcttgccatttatttccaaagagacaccccgaccccgcaactgcaacggttcgcgatgtaccatccccgcctcccacctctgggggtaggcggtgccaaatgtcgccaaaggatgctctgacgggagtctggtagttagccgctctctaggtagggtcacgatcaaactcagttgcatttcccccccaccaggcctgccactgagcgttaaattcaccaacactcgcacccccctgttgggttccattaagatgaagtgataccagtctttccagtccaagggggaagactggtcatcagtgggaatgcgtaactgttctacactcgctaatagtcgttcgtctatagtcatcgctgaagagattgagattctccgattacatcttccccaagagcctgaggtgaagtggggcgagttgcggcagttggtgctaaagcggcaatcgcgtctaaaatggctgccatccgtgatgacgtagttgccaatcctaaaataatgacttcaaaccagcgatcgctattcatccccagctctgcacttaaagcctctctagcagaattattaggaaccaggggtttgagttcgctatcagctggcagcaaattccacaaccactgttcccagaacaccagtatgccccccatccctgttgctacactgatggagctagcaaaagcagtagcagtagactgactaatctgcaaccaccgaggcactttcgccgaggccaaagcaatcacaccatttttaaaaaagcgggtgcgccttatgcgatcgcggaactggcgactcacgtggctatctgcatcctggtttccgatttgggcgagaactaacaatagttccaccaccaaccaccgcaccggcaagacgtttaatcccggcaatgctgtcgccaaaacataacccgcttcgcctgctttagcgtcggcaatggttatggggggtacgacttcagcgatttctgccaaagtcttagcaatgcgaggcgacagcaccgccaaccccaagagaatatccccaaaccagcgatcaacatccatccccagttcagtgacgacggtttctgccaagaatggcggtacaaaaatcgggttgccgatttcgttggcttctacatcggtgtctgctaaactcaacagccatcgttcccagatataaagcagtctttgttttcccgatgtctgacggctaccttctaaaagcgtattagcgatcgccaagctttctgagagccatcctgggaattgtgccgaggctagagcgatcgcaccgtttctaaagaaaaccgtgcgttttagttgttctagcaatctgctacccggtaacgttcgagcatattcttctcctgtttgagcgataacgattaacagttccgccaccaaccagcgagtaggaattttatctagatcgataacctcggatattagacccaagataccagccctagtgggatcgaaagtatgggagcgggcattagtttccccagaaacagggaaggtaacaaacaagggacactctaaaacgtgaggtagcggttgcgagacgggaacaatttcgatgtcgatgggaatagcttcttcttggatgccaggaaatcgcaaccaagtttttaatagttgccccggcgacacatccgaggggatagaaatcgtcattctctgaccaacatcactgcctgaaaagagataaatgtagggtgggtcaaggctttggctagccgaaagaactaaatcgctggcgaccacccaatcatctaaagtggggcgtaacagcatagcctcgttcatccggttgcgaacgcacattcgcagcaccagagtcgaacctggttgcagtttgagttcgagctgtgaaagttgaggtgagttcatattagacatctccagaaattaggtttttacgctgattaaaacaagtgatttgatagtctatttgggagaggtctatagggttacagtttggtgagttttacaggttgcgataaattacatagttaatcagttgtttaagaaagcgacgatcttgaaaagatgaaccccatttttctccgggttgcaagggagattctggctggagaaaatttagagactcgaaaagtttgtcagcttggttagcgagcgatctcgccagttgccaagcgtgttcgatactaccacaacggttcatttcttcgaggataaatcctatttgttccggagttttttgttgtcgtggcagtgccaaaattcccaaaatctgttccgaagcattgctattagtaataacatgatttaacataatcgtgcgtttgccttcatagatatccccccctatttcttttccataagttttgagttctcctaaaaggttaagcaaatcgtcttgaatctgaaaagcgatccccagaatcatcccaaaccgagttatatctgccagcggtttaactagctcgctaagattgcctgtagggtgtccgataatcagaccaatccgcaacggagtcataaatgtgtaccagcaggttttcttgacgcacatcgtaaaatagtcttggtctgtaagatggcctatattattagcaacataatctaactccattgcttgtccttccacagattgctgcgccataaattcgatctcttgcaagacattgagagttttttgcaagccgataactgataagttttctagcaacagacccactgctaagacgttagtagcatcgccaacattgattgcccgaggaatcccaatcgcatggtgcaaagttaccttaccccgtcgcgactcggaaccgtcttcaatatcgtcatgtattaaaaaagcattatgatataattcaagcgcagccgctgtcgccaacaccctatctcccatgccacctacagctcgggcagcactgatacacattgtaggtcgcaacatcttacctgcacgaaaaggataatctttaagcaattcgtataacggagcgtagcctccagatatatcgcgtttaaaattaataaaatcggtaattttatcagtaatagcataccgagagtgctgcaatgtctcattaataatagttttatcgaacttcggtttctctgatactgtaggcagtgcaatatctcctgacactttaggcagttgtacactatgcccattgggtaatacaatcgcagttgttctaccttcccacccaccgttgccgttaccatcaccgttagattgaggttcgtttgctactagtacagtcgggcagttggctttgagatcaggttgttcgagttcttgttcattatgtgcttctagggcggttctcaccaagactaaatcagccttgctattagggtggtggtgattgctcttggctttgtaggagagagccttttggctgcgaatatctgccctactgttggaggaatgaactagtgccgaactttgagaaagcttgctgttctggttatccggttcagagattaaccagcaaaaaaaagtgaagaccacacaaaacaaaaagatggcaaacatgcatttacctaaagttgaatcctcatcaaaataggtattttatcaccagaaatgtttgatctagatacaaaactttacataatgaggtagactcttcctgtctgagagcttttggttaacatttagttaacttaatcatccagtggacatagctgatttcttgacacatacatgtctgaagatagcgaggtttatcaagtagcttttgcccccattgttgaagaatttgtataacttgtagtatcaaataagcaattaatgtcgcataaatctgtatagcaattccattgacattttttgtaattagtttgcccagtttcaaatgcatctttaaaaacttccataacagctcgattagcttgagtaaacttccccagcaaacacccagggtacctggggtacctggcaccctggggcactggtgggaaaccattgacatagtatcgcgcttccccaaaatgctccgtccgatattgacctcattaaacagagaatccgtgcttacaatcagcgttcttacagaggtatttttggccccctgtagaggtctttccatttgaagttgaaatctcatagctagaaggaacgagaacaattgctatcgtcatgaatgcctcaaccttcgagcaagctagtgatgttgattattttattaccaatgttgactcaacaatagccacgccggattggatagttactacctatgctcaaaggaattgggtagaagtattctatcgggaagctctcatgctggttagggctattctttatatcaagtcagagattatagaagcctgacaagacattttattcttgtgttttgtgcctatacatttattttatggcacaccttaaccggaggattaagacggcgttgggcatcgaacctttaaacacctttactgaagccttagaggcgtttcgcacagcaccgaacacattcctattaccactcaaggaaaatttagccagcagaccatttttgaaatttgaatccgagcagctagtcagaaagatagtatagagaatactaccaaagtcttaaaaaatgttccaacaagtaatgatgttcggtatcacttagagaaatatgaaaatttagcttccctggaatcggatttgaatcaagcacttcaaagccgcttacctgatggcatccgctctttacgacaaaaagtcgctattgacttcaacgtttatgccgtacacaaagtgcagttgtcactacagctaatacatgatgactatcgtctttgcttcggaattgaaagtagctatcggctgaaaaatcagtgtcagataaaaacaactattaaaagccctattattaggtttctatttgtgattttagcctttttaattgttaatattcggatttatctattgttgcattatgttagtggtttgagaagaaactcaaggcaagttttttccaagttgtttacccttaaacaaatgctggaattcttacgtcaaacagtagatcgcgcttatgaggttgtttgtgaagtttacttgccatatagctgatatgggttgcttttctgccttgaattataagctaagtttatgattcatctcaagcaactagcttttgttcactctccgagaattggtatcaaaagctacacaatttgcccttgcccagagcgatcagcttcgctggtgccgtaggcaatcgcaaaagttttcggtctactgaatcttcatttgtaaaattactcgtaatattccttaataaaaagcttttgaagtagaggaaacttattttaagttatgaaagtttttgcctatattcaaggaatcactcaccctattatattgactacctgtgtagcactcataaaatcctcatcactttcaaaccaagttaaatgaggacaaaccgttagctcagaagtaacaggagactggtggatgctcactgaagatgagttcaaaaactggtgtcgccgccttaacatgacggaactagcgagaaagacgatagaagtaattcgctcatccgaaccgtcgcggcttgttggtgggggtagaaagaacgtttcaggacgctatcccagcggcaagatgagcagaactattcagtttgagtcacaccgtaatgagctagcgcatatctataaactagagctagacgaggatgtactggagtactacgaccagcctcctcgtattgaacttgattacctagctaagtcaggacgacgaaatcgccacccacacacgccggactttttcgtcattcggaaaaacaccgcaggttgggaagagtgcaagacacaagaggagttactcaaaaaagcacaggagagtccgaaccgttaccagctcacagagcagggtaagtggcaatgccctccaggtgaagagtacgcacagccacggggtttgtactactgtttacgctcatctgctgaaattgattggatattccagagaaactttgtttggctggaggattactttcgagacaaagtgccacaagtagatgagcaggtgtctcgtgccgtcctttcaattgtagaagccgagccaggaattgtcgtagccgagttactcaatcgtgttgagcaagcgacagtcgatgacctcaatatcctgattgctactgttcgagtgtacgctgacctcagtgcagctctattgagccagccggagcaggtgcaagtttttttggatcgagaagaagcttttacttatgctcaagtgaccaagattgctcccgcagcaccaggaagccaggtttgcgccgttaaagttagtgccgggacatcaatatcctgggatggtgaacactggcagattgttaatacgggcaacacatcgattggactgttgaaagacaatggcgagtttatccaactacccaacaaggtgtttgagggtttagttgagaaaggccaaattactggtcttctagcccaaaccgaatcaagccttaatgctgaagttgaggaaatactgtgcaaagcaagtaagagagaccgggaagaagccaatcgtcgctacaaagcgattgaacccttcctcaatcgcaactcatcgactaaacctaatagttccgaacgtcgttggattgtcagctacctcaaagccgaaaagatttaccagcgaggcttcatcggactcctcccgaaccatcgagacaagggaaattacttgccaaaaatcagtgaggaagtccgaattctcatggaggcgttcattgaggacaagtatgaaactctcaagcagcagtcaattatcagagtttactcgtcttttaaagaagaatgcatccaacagggaattaagcacccaagctacgaatggtttcgtcaagccgttcacgggcgtcctgcttatgagcagactctaaagcgcaagggacatcgagccgcttatcaagaggaaccgttctactggcgcttggacagagaaaaaacacctccccacggtgaacgtccgtttgaaatttgccacatcgaccacacccaagccgatgttgagttggtcagctcaattatggcggctatcggcggtaacttagagttcttgcgtaaaaacggcaatcaagagcgtccttggttgaccttattgatggacgcttactcaagacgaatacttgctgcttacctgactttcgatccaccgagctaccgctcctgcatgatggttttgagaatttgcgtccaacgctttggtcgccttccccaaatggttgtggtggataacggtgcagagtttaacagtaccgactttgaaaccctgctagcttactaccgatgcactaagaagcaaagaccctcagctaagggacgctttggttcagtcattgagcgcttttttggagttgccaaccaggagttttggcacaatctaaagggcaacacccagattatgcgaaatgttcggcaggtaaccaaaagtgtcaatccgaaaaatcaggcagtctggacgctgggcaaggtatacgaatatctcagtgaatatgtttatgaagtttacgaaagctcacctcatcctgccttgaggcaaagtcctagagatgccttcaatgctggcattgtcagaggaggtagtcgagaccatttgctcattcctccagacgagtttcggctactatcgctcccctcaccaacagatagaggaggcaaacgaaaagtcacgcgggaaggggtaaaaattaatcacctctactactggcacaaatccttcagtgggataaaggttcgggacacagatgtagaggtgaaatacgatccttttgatatcactgtggcttatgcctacgtcaacaagcagtgggtgaaatgttcttcaggatacctccaagaactccaaggtcactcggtacgagagttgatgattgctacaaccgagttgaaaaagcttaacgagattcaaaatcggcaattcagtgaaatcactggtaaaaaacttgctcaattcttggtctctgtagaaaaggaagaggttgctttatcgccacaaaggcgggatgcaaaaaaagctgtgctagagcagcgcaagcgggatttagaagtcaagcaggtacatgcactgattgatggtgattatgtggaacaagatactgattcttgtgtagaccatcttgaagagtctaaaagctatgaaagtgaaagtttacccctgcccacagagtctattctactggatgatgaggatgatgattttgaaaattttcaacctctagaggaatggtgatggcaactaagcagggattcccaccagaattactcactcaatcagcacaaaagcgcttagattacttcaaggctcccggtaaaaccgtaaggcaccggaatctggaattagcgtataaccaagttttgcgtgccattcgagaaccagcaggagcttcgattattctagtcatgggtccatccggtgtaggaaaaaccaccttactgcgcttggttgagaaaaatattcttgaggaaagcttgccacagatggaactcgaccccggttggattccgattgtttgtgttgaggcagttgcaccaggtaaggatactttcaggtggaaagatttttataaacgaactctgattgctatcgatgaaccactgattcaggagaaaattagctatagcgaagacggtatccgccgtgatagcgaagggaaacttattgttaagtcaagggcaacggaagatagcttgcgtttagcaatggagcaagcgctgtctcaccgtagaccctacactctagcggtagatgaatttcaggatattggtaagatggctagccaaaaggttttggaagctcacatggactctattaagtcagccgtgaatactaccaaaattccttggactgggttcgggacttatcaactgctggacttcctcgaactgagtccccaattaagccgacgtactcggattattcacttgcctcgctaccgcctagaggaagatgaagacatcgaggtgtttaagttggctctaaaacatttgctgtatcggatgccattaccagaaacaccccgcctagtgaacaaatactgggagtactgctacgaacgtagcattggctgtattggtacactcaaagattggctggtacaagcacttgaccttgctcttgaagaaggggcaacaactctcagccttaatcatctcgaaaaaacagcgaagttaacctctgagtgcatacaaatggcaaaagatgcgattgagggtgaagacatgctgaccgatagtaaagagagtcaacgccaattgcgtgaacttctgaactccaagaaacaaaaaattcaggaagctcagactaactcaggtaaagacgataagcaagagaacaacgctggtaagtcaaagggttcaagcagacgacgagtgggtcaacgcaatcccaagcgagacccagtagccagtgaatcattatgacagttgatgaatgcacttcagttgagatgtgggatttgcaaaaacctgctcttccaccgcgtagccgtctttatcacttagaacctattgggattggaacccaatatacagaaagcttaagcagttatctttgtcggttagctcaagagcattgcgttacctcccagaagttagttatgggagaaatcgctctacaaatgctgggagaagattatgaattggctctaattaagaagcatattagtacccttttcagtaacagtgatgctaagccagccatcaatggaatgagggaaaagacgcaatctcttgtccaagctttaaaagagctaactcagcgtaaagacttaaagtttttaagccttttaacttggaaaggagtgattaatgaacgagagttatttcgtcaatatcgagcctggtgtcctcagtgtaatgagcaatggcgacaagggagagaagtaatctatgaacctttactgtggtcatttaaagaggttaatatttgcctccatcacaactgcctcttagtggatgaatgccctctctgtagttcccgcttacctgtgattgctaattccttacaactaggattttgttctcggtgtaagggttggcttgggagccaaggaggtgagaagcaaagtttcaaaactgatgagatggaatggaatcagtataaggtaaggagtattggagatttgattgcagttgctcctaaattagagtatcagcttagtcttgaaaatttggttaggaaattacaactgattttgttttgttttgaaagagctgtgaatcaggatttgactcaccttattaaattgggcaagattatggagcaactgaagatagctttaggacaacattataacaaaccgtttcatttggtacggttgcttattcctgtttgtcataaagctaatatatccatatctcagttatttttagaagactttaattcattaagcgaaattttactgaaaaattttcaaattaattatagtcttacctagactgatttgtagaatagcctaattaataatgacgtagtacaaactaaacttacatgaatgagcgatcgcatcctcacctcctccaaaacgcgatcgcagcttcacctcatgccaaaggtgatcgcatcccctcacctcataccaaacgcgatcgcaacttccaagatgccattgcaattctgggcgtagggtggagtgccgcctccttccttccgtctccagataagctcggtgaaaatgccaatgaccccgttaggatgttcctcgcccagtcaccactcccaccaacctggataaagcctgctgttccactggtatacaaactcagtgtcgcaatcgtagccgcagcgttggcttggctgttgattcgcttatggcctggattcgtgaaactaatcccactaatacccaaaaagaaatagttctaaaacatttgcagtgccggagcgcccattaattcgtcactctagccggatgtaggcgattgccgttaccgtttttatactccgccacggatggctcaaacggttcaataattaagggcttgcccattgccttgccaattaactccattaaggcttttgtccgtgccgcgaaaaatccctcgaagtcgtcttggcggagaaactctggctcaatagcgtgcgatcgcagcatatcatccaatttctctggcgaggttcccgacatctcaaactccttgagataaaccgaaggtgctttggaaccgatttttttattcgttttcgcgcttaagggggtgcgattgaccaagcagttgtattttttagggtcaatgccatgctttcgacaccacgaaactgggaagatgtggtgcgattccactctttgttcaaaatagagtacatcattaatttcttcccccgtactccaatccactgcccctgataggcgcaatagcgcggacaagccttggtagaccgcaccataccgttttctggcatttaagagtcgctctaccgagaatttggcagaagtcaccgtcgttggcacgacatcaccggataaccaaaggggtatctccactaagtcacaggcggttcgcgcctccccacgtagatacagttctccaaacatcccacaccataaccaacgcgctaatcgagaacgaacttgttcgctatccgatcgctttcccagtacagttaaaattgccgccattgctactaattggatggggtatgccaaatggttggcctcaaagattttctgggcgtgtaggaatcgtgcggcttcctcaaaccctctggtaatcgggtctgcccaagtccggtattcttcggttgatagtttcaaaacgtctgagcgccgacagctaacagcgggtaatttctcggaaactatccctgcacgaaaggcattttggcgacgggcataagaagctgctaaggtgacggcttgaagaaaatctgtattccttaaagaacgcaaggctttaaaagacatcaggtgaacctctcggcgcttccaatcgtcacgcagactgaagttgtcagcacagtaactagcggtcatcaggtcgaaaaagttcaggtcgcacccagaggtgttggtatcctcaaagacctggcaaaccgcgtcttttggcaaggagtctcgcagttggatgacaggcatctgataatgctcgaactttttgaggatttccagctctaaggtatcgaggagtttgagtttttcgctatcgtatccccaaaatttagagtattggcttctccattccgaaaaaaagaagacttttgataagggaaacagtccgactaaatattctcgacctggcgtagaaaaatcaattaccccatgagctgttcgcagcttttttgattcaggtaaggcgataattgtgtcttttcggtcgatattggggttgagagatttttcaatgtccaggtagtaccacttgcggctgagtttgttgctgttggagtctttaaccaggacgggttgctcggatagcagcaccatgaacagagttgttaggcgctgttgcccgtcgagaattaataagtggggtgcaggaggttgctgtagggtagcaccatcgagcaggcgaggcttgaagcgcacttgaggattcccttgttggagtagcatgacagcaccaacggggtaagccagggataggcttgtcaataaccttttgacacgagcatcatcccaaacccaatcccgctggaaatccggcagttggatgcgtccaattttgatgtctttgaggatatccagcaggggatatttggtgatgtcgaaggtgctgatggagttcattcaaccagggagcgatcgctactacttttggcaaactactccccagctctcgtgctggtcaagagttcaagaaaaagtcttgtcaaattgacaaaattcttggcaaaacacggatgaattaaccttattgtctgtttgagtgccactgttctaagagcgggtgaacttgaggagcgttttccaacagaaaatccgctactgccataattctctggtaaggaagccctgcttctcggcggctggttcttccccctaaccaatggttcgtggttgattgcgagacgcagcaaatttgagctaattctaatgaccctaatccccagcgatggctaaacagttggggggatatcaacatctgattgtgaagttggaggacttgctgacgtgcctcttgttcagacatgatttgctctctcaagctattggtggtggattgagtcgttcgatatctttttcaaaggcaaagtcataatgcgtgatggagtgagaaggactttgttgatcgaggagaatcaagtagtgaagacctgtgactgagcagctagcggagtgggtgtagacaacgccaaggatacgaccaaagtcaggattagggacttgacgccagcgcacctgttcgccgagttgaaactgttgtcggggaaggtgttcaggaacgacctctggtagagcaaatggcggcaggtgggagggcatattcggcatagttaagttcccaaaagcaacttgcctttattttattacttatagtctataaaaaataactcattgtctatggactcatgacttgcacttccagaaaatcgtgcggtgagtcgaaaacaacaatcagagattaacaagcgttttgggaaagcgatcaggcggcgtcggcgagaattagacttgtctcaagaagaacttgccgagcgagctgagcttcaccaaacctatatttcagacattgagagaggaggacgtaatccttctctagagaatgttgagaagctagctaaagcactggatatatcgattactcgtctgtttattgagtatggcgttgaggtggagagtgagtcgaagaaaggtgattgactgttgaacgatgtctgagtcatcacccatcgaagcgtcgtaattaatcgcacctttactgacgcgattacctttggcactagccttcaggttgatcgcaccgcttgagggctgctcgaactgcctcttcaatccgccctccacgatgcttgtcttgaatggcagcgatcgcgtccaactgctcaatcagagagtggtggcgatcgcctgtccctgaagtcagaagcctcgccacaggtattcggtagatttggaacttagaaactggtgtaaaagctggttaaacccaatcccggaatgaagctgaggcgtgatgaaaaattaactcaggacttacgcaaagacgctatatagagcgtaagagtcacatgagttgcatgggaatagaaggatgtttgagttcctcaatcaaggaatcagaaagccactggtatttcaattgatagatagtctgagcggtgagtgcagctagtcttttcaagtgagtccaagatagaatcgcacaagcgatgtgatttctttgaattctggctttacgacattgacaagcttccaggccagtcagttgcttaactcctcggtgaaactcctcaactttccaacgtacagcattcactttttgaacctcatccgttgagacttgagagcagtcattagtgacaatatagtccgttctatcggtagagatagtaacccggaatagtttcacctttttatctttgggaaagttcttgattttaattaacttgccatgctgttgttcgtttattgaccaactcaattgttcaatctgcttatatttctccaatcctccactatcatctaccaagcgatgccgtttgagaggacagtaataaattttaccgagttttaagggtggaagccattagcttatgagcggcgtaccagctatccatcaggactcggatgatgttcgtcagagtgtaatttttctgagtgctgagtaagtattggcagtaatctagtttagtaaatggcacctggtgttcaatctctactcgacttgagactaacatgctcaggctcaattattagtttttttccggtgtagctgtatcagaccctataccacttcatatagcgtacctgcgtaagtcctgaactctttctggacggtagatctcgttgggttggcgcacgcgcttcccccaagaacaacatctggcagtgacggaatactgacatgattaaccgctactcggtggttcgtatattcttaattttattttcataaatacattaatgatttatgtgattcaattgaatgtcatcttgtaggcagaatctaaaaattagtagaaaaaatggaaaatataagcaactccctagtgttacaactttccgacgtggttttgtcacccggcagttatgtttcaacacctcgattagaccttcatgcaaccagttttacaatagctacgaatgtttggcttgatagcacagaaaatcgcaatatcctgcttggcaactggagtagcaacagaaaggcttatcaattactttttggtatcctggcgggaggacttcctttcatcagtctgcggaaagatttaccaataaaagtcgggcagccacctgaagatttagttggtactcacaatttgaggagtactatatctgtggatgctaagcagtggacacatgttgccatcacattcgattggggtgatgattacatatcaccaacagcgacgctttatgttgacggaaaagcagcgggaagtgtttcgcctcaaattacacctgactcgcgtgtacataatctttacactttacagcccagtccaaattcctatctgatcggtaacaaagaggatggcgataccagagacgattggtttgcaggtcaattaaaagattttcggatttacactacagcattaacatcggatgctatcgtccaacttatatcgccaacaaccacgaagacatggactaaggaactcgtacaggaacatgctaaggtcgccgtgatggtggagatgtacaccctgcccttctatttgactgtcctcagctctatcaagcacaaagcatcctctggctaccgctctatcttgagtatctgcattgaggagatgctccacctgcaactggcggctaacctgtgcatagcactcgacactcagccgatattcaccgcaccgaagtacgacggtactcccattccatacttagatcccacaaatccaaccactgggcatcataagctgatcaatgtaacgttggatgccctgaatgaaacaaccctggatttaatgctcgacattgagactcctagcggtttagaggaggagcgacatccagaggagggggtgcgagccaaaattcaccgtgccgaagatactttggaggcaaggtggaacatgacgtatcatataactccacagtatccttacaataccattggcgaaatgtacgaggcattggttacaggaatcaaagttgttggtgaagatcagttttcttggaagactaccaatcagcagtccgtctggttaaaagagccattcaaacagataatcgctagctttgaggacgtagaaaacgctatcaagacgatcagcttacagggcgagggtacaacagccgatgaagatagctatgctatacctccaaactaccgtttggagggtgatgatctcgatagtggttctttaagtgagtactctcactatgaacgacttctggatatcaggaatcgagaaaggagtctcgagcacaagtttccagatgtctatacaactaccaatggttcgcccagtaaggagcagcaggaggagcagcagaaggctttgcaagagcttcagtcgggttatgctaacctactcacagatctagacagcatgtggaataagggtaaagatcccagtaatagcgacgttaatttttggacagacatgtgtgggctactctcaaccgccgaggattgttggaaggcaggtgtcattccgaaatggtcttaagcagaatggcactgacttaagaggaatcaggcagctagcttacgtttgagaacatcacgggattgctgtatccaaccgtagggcttggggcgttgtttcttgagcctgggttcatagcgatagggacgctctggtagtagcttatcagtcaccacgctcaagagagtgttgtaaagctgagagcgttttgtagccccggctttgtataactgggtgcagaagttgcccaaatgttgacgagtaccttgcaaataaatccgcagtgggcagactccggcttttttgcctgcttgccacatgacagttcgcaacaagttgtaagccatcaaatgcacataaatttccttacgaaccatctcaggagttttcccaagtaacatctccatacctaaagtggtttttacatgacgtaaatctacctcaaccggccatcgccattgatacagttgagcaagtttagctttggtgtaaattttggcatctaccaaagtagtaacaacaataatctcctttgagcgaaagcccttttgctgaatcagcagaggaacaacggccggattgtagcgcgagttgaggaactggcgtggaagattgagaaggcgcgatcgctacgacaacaggcgcttgaggaaaccaagattcttattcattcattggctctaccgatcaaaaatgtaccgacgaagacattgccctattttatcaacttcgcagccaccgcacctacgacgaaacccccttaccagaagccagtttagatgacttcgaccccaacgcgatcgccgaatacagacgagccagaagccaagttaaccccaatgctgctgaactcaactacaccgatgaagacttactctacgctctggcagcaaccaccaaacatcaaaaagaaatttgccccactctagccggattaatgctgtttgggaaatcaatggctttgcgtcgtcactttcccatgaatcgcgttgactatattatcgtcgagggacgcgagtggattcccgatccagctcatcgctatcaaaccattgaaatccttgaacccctgctgatagcaatacctaaattagttaccctcatcctcaacgatatccccaaagcctttacccttggggaaaacggcattcatcgcagcgaagttcctctaattccccgcacagtcattcgagaagcgatcgttaatgccctgatgcaccgtaactatcgcatccgccagccagtacagattatcagattttccaatcgcctggaaatccgtaaccccggtcattccctcaaacccattgactcccttggagaacccggttcagtcactcgtaacgaaaagattgctgctgtcttacatgaaatcgggattgccgagacaaaaggctcagggattcgagtcatgttcgatgaaatgcggaaagccaacctcaccgttcctttatttgaatcgagcaaagaaaaagacagctttaccgctctactccttgttcatcatctgttaagctcagaagatatagagtggttagcccagtttaagcattgctctctgagtgatgatgaagcaagagcgttgattgtcctgcgggaagtcggagaaatcaacaattttatctatcgtttgattaactgcgtcgatccgcttacagctagtcaacacctgagacgcttacgggatgctggtttactcgaacaacaaggtaaaggctcagcaacctactacactctacattcggacttactggacaatgacttatctagtgagttcactgaacagtttgcctctaatctagagagtagctctacagataaagcgttatctatagagttcagctctacagataaggacagttatctagatcagatgcctgaacacttgcaacaagccgttcagactctcggaaagcggactaaccctcaagagattcgttctgtaatcgttgctctttgccagtggcgagacttgtcctcacgcgaaattgctacaatcctcagccgcgatcaaggctatttgctcaataaataccttaatcccctcattaactccggcagcctggagtatgcacgctccaaaaatcccaccgatcctcaccaagcttatcgagcaacgacgagagaacaggcttggtgatactctgccatctgagattccttgctgagcaacgcctatagacataaagccacgaagcacaaacgattattggttcggcaggcgatcgcctccagctgagcaacgcctatagacataaagccacgaagcacagcccttctcaaacgcctagttagctaagggcttacagtcaattttacaagcatctgtttgagacactgcctgaagttacaaatattcttcaatttagtcactctctcaatggctggaattcctatcctacaaggcttttagtaatttgcaagcatctttaaccattactagaactctgaattgctgattgtataaacgttacagccatttttcctgattcaatctcctcaccattcacagatgcttgcaaacaggagcttgaattgttgtccaagaacagtctggtggagactgagtagctatttcctgcaaccgataacgcagccagcgtgttccctttgagccaacgtggtcaacccaatagggtaaagtaatgaatccttcatcatctcgaatcaaccactgcctagactcactacgataatcatcagatactaacttcaccacgttaaccaaatcattactttctcccaggtacaagcagccaaatcgctgaactgaagtaggatgcatcaatgcttgttctaccctttcagaaagagtaggctgtacttgctctgctccagatgctacccatgtaataaatttgacatccgtcagaatctcttggtactcaggtattctatttctagaatcgctgtaatcttttaccttaaaacgccgcaactgccgcagcacattagattttctcggttgagacagcatggctattgccaactgtactccacaatgtttgtaagcatctgtttctcccactaaagaaagcagcatgccatatgcagttgacggaggagggatggaataagttttgccatattctctcccatgagactgacggaatgtagcaaaaggaacctcaatatagagagctatcgaactcatgatgatggttgaaattcaattaaatttaaatctctagcaataactcgttttaaatcagcaacggcttgttctctacctagaaatatatgagcatcttttagatgtagatttttagcaatcttgcccccaatccacagctcgcttccaataatatcttctacttcaacttgttcaatcaagtcagaagatactattgggtctagttctaatgaatgttgttcaaaacaatagaagaaatggggcgagttctgctgagtccagcgaaacatcatactttccggagaaaaatcatagcaaaacacattattgtgtccccctaccttacggatagatatcaatccatctaaaacagcaaaaattcgagacttgtctttgaggtgattggggtctagcgcaaacacatattgataacgagtattatgatattcgtggaaatgaagcgatgttcggtctttttctccactcttagcattaaacgtcatagttccattgtagggagttaaagaaatcgcacgattgacccctaatgctcctaatcgtggtattgacttccctttagctttttttcttcttttccctttatcctgtttatcctgagtttctgattcttcgtcagttatttcttttttcgcggcttcagtccccatgtagcccaatacatcatcatcaataaatcgaaccgggtcaaaattattatcaattaatttatgctcgaaagtatctgcattccaaacgcgattaaccggatagccttgttgttgccaatagtaacgtaatgcccaacgaatggcatctccagaaacggtggaatgagtcttattgtgccaccaaactttctgcaaaggactaacattcccttttgattgtccatgattcagtgaggcagaaccatagtgagttaataggttgccaaataattggtacatgatattgattaatctatgaatgacttgctggagttacctcagagttttagctaaattctcctgatggtttttcgctgggtttataactggctaaggcaatcaagactaaatttcgagctttttcccaagaaatttgccccatcagaagtggtaaaatagattcccactggtcatgtaatgcagaattaagacctgctctggagagaaaatctgataggaagtcgttaaaagattgctggtcgtagcatcgtcccagttctcctcgaatccgttcatattctcgctcaaaacgaggagcttctccttccttagcacgaccataaattttgccatagatttttcttaatgcttcatggcaagctctaataaaagatttataaatttccatttcctcatcgattttaatcatgattcttacaccttctcggttatacaacagttgtttagataaatctccaaatgtatcctgattaaaagttatccaaaaatctgaccaccatggtactcccttgactaagttgtcagcaattatccctttaagagaattaactttaactatcaattttaaccccttccgtaaaactttattttcctgaaaatatttattgattaatttataaagcaggattgtttttgcctgaatttctatattctgaatattcgttaaacttctttggtttgagtctttattcaatttttcgtataacaagacttggcaaacttcgtgatactcattggagttctcagtttcgtcatagctgtagtagtttaaggcagcttctccccaactcgctacatgcaaatctttatagtctaatctccgcaactcccaacgtcgttgagcggcaattgttaaattggtaatttcagggattacgacaatatatttatcggcttgttttgtgtcaacctttgaagaattagaatgccagataaaatattggcaaacaagaggtaaaaacagtaaagctagggcgtattctactttttcttctagcttattagatttctctaatcttgcatgacgaactgttgctcctggataaatccaactgacaatctgaatgaaatctcttcgtaattgccctgcttcgtcacagagcttattagcaaaggattgatgggcataccattctatttttttgtatttaagcgttcctgtaataccatcaatactcaaatcttcagaagcttgctctcctgatttataaaactgattgtgccgtaaaaaggtagctcctatagcttgatggagatggatttgattaatcagctccattgatgaagaatccaatccagttaaactaattagtcctttttcattaatctgaaaggattgtctgagtaaccaatctaaaactattaaatcttctccttgccagtcaagactgatactactgttagtcagcgaccaagatagattgtttggacgactagcatgggtgggaaatcggcgttctagttggtgtagattcatccacagtcccaccatcgctacacggtgcatgatagttgtatccgaagccctgagagtcaggtagattttgggtcgcgtggttgttgtcattgcctttccctcttgttgcgccgtgaagggacgaacacaccacacatcattttctgctttccacctataccgtatttttgtagggtgattgagtcttcgggattcaaatcagtgacttgtatcccaaaccctctcacagcaaatgttccagtcgtatttttaatagtcagttgtctgcactggggttgaccgttgcttctagtggaaagattaatacttccttgaatacctttgctttttaattgatgtttggctgcttctaaaaagcgttgaggttcttgaaaacgtttaattataacaagacgagaatataggtctgaaaaggggtgtaaaggattgtattcaggaatacctaagtgaaattggttttgaccaatactgaaagtttgtccagctagagattcgtagataaagggaattaagtctacaggaagccgtatttgcaacttagaacgttgcgtaagacgaagttcttttgagaattcgggaatgcctgcaatgggatggatgctgatgttgtctagttgatggatagcaggacagatacgggacagagcagaatagataatgtagccattatccaggggaagggttgaacctgtcagggaaaaccccaggtctatatagggagaatcctcggttaacatgattcatttctttaattttgagtagtgcagtaaaatcttgaaataaaacattaaatactctaggagaagataattaagtttaaaggaactgataaaacaaaattgattaattcaaaaaaattataatttctttgtaattttaaaaattttcgtaaataacagtagacttaatttaagaattaagatgagagttcaccctgattctgagaaattatggagtatagaaaagcctcagttacctaaacgtagccgtctttaccatttaccgcctgtaggagtaggaactcctttcgtagaaagcttaactagttacattgctcgattagcaaaatctcatagtgtatttccaggaattttgctgtcgaaagagattgtgccacttgtgccgaaagtttatagaagcactaacctgttcggcactcgaaacttaacaggagcagtaaacgggacaggcactatggcgctggatttagttcaggcgctagagacactaacgctgcgtaatgatttacctttcctcaccttaataagctggactaacgtacttccccagagaaagttactgcgtccggtacgagcttggtgtccagcctgctatgaggagtggcgttcaacaaaacagataatctatgaacccctcatgtggtcaatagaggcacttacactatgtccactgcataggaagcgcttacatttccagtgtcctcactgtcgctgccaactttctcctctagctccttactcacaaccagggtattgttcaaagtgcttgaaatggcttggtatctcctcaaattctgaacaatctaataacaagccattaggagaggaagagctagtatggcaaatatttgtgtcagatagcattggaaagttactcaccgcggcacctcatttacctcaaccactgcttcgggaaaggatggctcaagctttctgtacctatgtaactcaagtaacggaaggaaacatagctgcttttgcccgtttgcttcaaatccccaaaaataaggtatggatgtggcacagtgggaaagtcttaccacaactcaatgtccttctcaaagtctgttactgtcttaggacatctgtactaaatttcttgctcaaagatacggtcgaagaaaatgtcagtttaatgactacattgccccagacccaagtggtaaaccagtttactcaaccccctcatgttgagtctgaccttaatcgagtgcagcgattgttggaaggtgtgcttcagggagatgaggaaccaccaccaccgatgactgaagtagccaaacatcttgggtatgataagcgggtactccgtagacgtttccctggtctatgtagagctatctcagctcagtatcttgagtacaagaaggaagctcgtgttgaacgaattaaacagtgctgtgaagaggttcaacaggctgtcaaacatctatacactcaaggcgtatatccgagtgaagctaatgtttcaaaaactctagctcgaccaggatgttttagagataaggaagtccgtgctgctttacaacaagcaaggtgtcaactgggcgtttaaggtgcttcaagtaatcggaggcttttaaatccctcaattgcattggaaaaaatttaaagcataagtttgcccatctggaagcgcacctgcgtttaatgagttacaagcataagttgaccatctcaaattacaagcataaagtgagcactttgctcaacttatgcttgtagtgacacactaagggctttggttattggtaaattttgatgggggcggtgggacttgaacccacacg

SEQ ID NO: 886 - DNA, 16336 bp, Cyanothece sp.
  source 1..16336: mol_type = other DNA
attagcttcgcggcaaaaacaaactttaaataatagaaagtattatttaaagtttgtttttgccgtattttaaagtttgtttttgccactcgattctctgaaaccctagtaaaatcgttgtactaaaattctagcatgaccgctttttcaagtttgagtttgccgaaatcgttattttcaggtttgacattgccgaaatagttgggacttgctatgatggttttatcgtaaatttgtattaatttgaggagggacagccatgctctccgataccgaatttcaaacatggtgcgatggtatgcaactctcccaacgacaaagagagttaatcacccaagtacgcacctccccacccattcgcaaagtaaaaggaagtgccagaaacgttcatggtcgctatccaagtaaaaaaatgggcacaacgattcaatttgaatcccatacggttgaattacctgcactgtgcgaattctacgaatatgatgactcggttttagaatactgggaccaaccctataaattcacgattaaatgcgctcctgaaggaagacaagccaccacaattactcattatcctgatttcttagtcttgagaaaaaatagctgtgggtttgaagaatggaagaaagagacaaaactagaaaaactgagtgaaaaacaaccctatcgttatcaaaaacaagaaggaatctggattgatactattgttggtgaatatcttgaaaacttaggctattattactgtgttcgctcagatagagaaatagattgggttaagtatcgtaatcagaagtatttacagtcctacaaacacggatatttagaccaacagtatattattgatacagcagtagaagaagaacttaaagatattatcaatcataatcccgggattgacctaactactctactaaataaagcccaaaacgcaacgattgatgatattaataccttaattgcccttgagaaagtctatgttgatttaagtgtagtccccatcgaggaacaactcgataaagtccacttatttcgtgacaaagcaacagcagaagcctatattacggctacccacaattatagtgaaccgattacgggtagtgtgcaaatcgtgaatctcaaggtggggtcatctttcttactagatggaaaaagcttaacgattgaccatgtaggggatagtaaaattattcttaaaggagaacaaggaattattcgttggactcatgccgaatttcaacaattactggaactcggagaaattactcatctggaaacagaagaaaaacccgctttggatgaagaaggatggcaatattttgtcgaggcgagtccaaaagccttagaaacggctaatcaacgatattcagcgattaaaccgcttttagatggagaaacttatagttccttagacatagatatatcagcacgaactttacgccactggaaagctaaatatcaaaaagcgcaacaagactatggatgtggatttctgggtttaattcctcaaagtaaagggaatccaacgcctcgttattctgatgaagacgtagaatttgtcgataagataattgaagaacaatacgaaacgtttaagcaaaagaatgcttggcaaacctatcttaggctaagggatagatggaaagaatcaggaagaacttctccgattcctagtcataccttttattatgaaagaatcaaaaagcgcaatagttatcaacaaactaaaagaagaatgggatctcgtgcggccaataatttgttgagaccttggttgattgaattaacaactcctcgacatggttctcggccttttgaaatctgccatattgaccacacacctctagatgttgaatgtttatgtccttatagtaacaagaatttaggcagaccttgggtaacagggatgattgatgcctatactagaagaattttagccttatatctcacctttgatgagccaagttatcgctcttgtatgatggtgatgcggatttgtgtgcaacggtttggacgatttcctgaattaattgtagtagataacggaaaagaatttagttctacttattttgaaacattactcgctcgttttgaagcaaccaaaaaacatcggcctaaagatgtgccgaaatttagttcaattattgagcgttggtttgggtcacagaatcgagaatttattaataacttgagaggaaatacccaaattatgaagcacgttcgcctcgtcaaaaaggagaataatccgaaaaatttggcaacatggacattagatgaactctatgattatttagcctttggttatgcttatggggtttatgataggatgcaacaccctgctttagaaggaatgtctcctcaacaagcgtatgaattaggattagcaaaaacaggacatcgaccccatcaatatattaagtatgatgagcaatttaagattttaaccttaccaaccactcagaaaggaacagcgaaagtcattccgggtacgggggttagaattaactatcaagattattggacagatgaattttatcgtgttgaaaatcaatctgttcctgtccgttatgacccccttgattatggcgtagcttatgcctatattaacaatcattgggtgaagtgtttatctaattatcatctcagatttcaaggttattcagaaaaagctgtagccattgcgacaacgatttgccgacaaaagcgaaaacagtccaatcaaagtctatatgtcggcgcaaatgagcttgttagtttactcaaaaatgcggaagactatgaagaattaatgttacaaattcgcaaagatcaatcagcaaaattagtctataatttaatagaaggaaatttaagcagtgcggttttaaatccagccgatattgagcatccttttttacaggatgatagcaaagttgataacaatttttctaatttagacgaagatattttacaacccagtttatcaacaacaactcaatcagataacgaggatgacgacatcggattttatagcaatgaggaattatggtaatgactgaaaaacgccttttttcttgggaattgttagaagactcaacggaaaacaaattaaaatattttaaagatgtgattattcctcatcgaaatattaaaactattttagagcagttactaaaaaatgcgattgaacctgatgatgcgttagtttatctggtttttggggtaacaggggttggtaaatctcgacttaaagcagaatttgagaagcgattattgagacactttgaagctgaaatcattgcgaatccaggtagtttggtagttgggggaattgaggtagatggtgcagaaggaggtaagtttaattattccgattattatatccaagttttagaatctttacaagaagttttgattgactataaagaaaattatgagattgatgaagacgataatgaagataatttacgaggagatcatgaagggaaaaattctaaagcattacgtcgaacaatgcaaaaagtttttacccaccgtcagttaaaagcttatactttagatgaagcacagcatttatttgatgtagcaggaggaagacaaatcaatgttcagatgaattggcttaaatctattgccaataaaactcaaacggttcatgttttatttggaacttatgaccttttgaagtgtcaagaagtgaatggacaagtagggagaagaagcgaagattattatctacctccctattatttggataattctgatgaccaaaaagaatttaaaaaagcaattaatactttacaacgacattttcctgttgaaaatgaacccgaattaaatgaaaagtgggaatattttatggaatattccataggatgtatcggtattcttaaaagttggtggtatcgtgcgctcaaaaatgccttggatgatggtgcaaaaacggtcagaatcaaggattttcaagcaagggaattatcttctggaagacgaaaaacgattaaaaaagagttagaagacggagaaagacgtttagctgccttatattttgaagagaaagccaaaaagcctaaatctgagtctcaagcttcatcaaaatcaagcacaagaaaagtgggagaacgtaaagcgattagggacttagtaggggttaatcaagagggatgagcatctatgaggagttttggagttctaaacccctaaaacttcccccaaggagtcggttattctgtcttaaacctatgggagttggaacttgctatacggaaagtctcagtagttatgtgaatcgtttagcacaggagcattgtttaacatcgcagaagttaataatggcagaaattgcgccacttattctaaaaaatgaggataaatcggatttattaaagaaaagtgttagtcatttattgggtaatacggatgccaaaccagtgattaatggaatgcgtgagatgacgggggaattagttagggtgttagaacagttaacgatgcgtcaggatttacggtttttgacgcttttaagctggaaaggaatgatttatgaccgccagttatttaaaaattatcgtgcgtggtgtccttgttgtttggaggagtggaaaggggagaaaaaggtcatctatgagccgttattatggtcatttaaggatgtagaagtgtgtttacttcataaacagcgattaattgaggaatgtcctcactgtaacgctcgtttacctgtatttgcaaggttatcccctgtggggttttgttctcgttgtcggggatggttaggggataagaaagaagagatggaagaggtggaaccccatcgagtaaatattgagggaattggagatttaattgcggtaacgccgaaaatggcttacaaaccgattccgattgagttaacccgtaagttagaggtgattttattggcgtttgaggaagcctgtgggaaggatatcacgttattgggggatttaggggtaattatggagcaaatgaggatagcaacgaaacagcatcaaaacaagccttaccatctggttaaattggttattcctgtttgtgagaaggcaaatattcgggtatctgagttattattattgaattttaaggcgttaagcgatagggtgtttgaaaatttggagttagggatgaggctttaaaaatgtagtattaatgatcaatgataaaagcttaaagacaattatctatcatattcctgtgtggcttgattaagttcatcaaccatataccgatacaaattatctatgacatcaaggcaactagattgtaatttagaatcacgggtttgactgtaaatttgtataataatttggctaacatactgtagttgattagaatatccaccatttctattaggactttctaatagaaagacattaacaaaacgttgacagactttaaaagcgagttgtttatcgaatttatcaatagttgtaaataagtgaagtaaatgaaaacttttcttgacaaagacagaactattaataaaagcctctatcattttaggatagttggttaagtcttggggttctaaatttgagaaaaatcctgcggcttgttcttggacttcttgattagtatcattaaatagttgtatcaatttctgttcacaaaattctctatggtcagcttgacgtaaattattaatataaataaaggcggcagcttttcgatgagcaggtgtacttaattttcctgataagtaattttcagctaacaattgagcttcagaattaatgagtgatactaaaaataagcttcttgctcctacttcttggacttctggaatttgcgagtttatcattctttctactataggttttaagtctgtataatgtgttcctaaagcatagtaaagaaaacgatttattgtttgagtgcttagtaatatatcttctgtatcaactaattccttaaacaaattaattgctaaatctctatcataatttaaaaccgcgattaaagcatgagcaacacaagacctcacagcaagaaagggatcttttaccatttgttgtaaagcttctttaaaataaactgtacgttctttgtctttaaaaattagatgagcaatggcttctaccgctctccctcgaactgaattaattcctttaatataaatatcgttagctaatgattgatctccattaatcacttgaaaaggttgccattctttgtcagggtttggatcatgtaacgcataataagtaatgatatcaaatcctatttcatcccaaggtagataagctaattttgtgactgtctgactaatttcacgaccacaaggtttgtgtggtaattggtggcaacgttgacagacatttaatactgtttccatctctatttcaacttcagtttcagcaattcctcttaaaatagcattaaagtaataaagattagtattatcaggaaattgatctattagttttgcaaagcgataaggatctttttttacttctttttcaagattatcagataattcataggcttcaccaattaaatctcccattttattttcatgttcacaatcgtatgttttaatagcctctaaccattgctcatcagtcattttttcagtagcattttttggaattggagaactgacaacgcttgctatctctcctatcggtgtaggtttgatgctttcagatgctttaatccatcctaaagacataaacttacgctgtaactcaaaaaatcgttgtgttagtctttgactaggaataaagaatttcgtatttaagaaaagtaatcgagaaaaactaaagatattctgtattaaattaaacttgatgagaacaagctttacaaattgttcaattaaaatatcattgataccgtctagtataataaactgaggatattctcgttttcttctcagccagttacgagaaatatataataattcttttaattctttatagtaatcatatattgccaaataaacaatgatttcaggatagtgacttattaactgcacatctaaaaatttagcgtgtttatagtttagattaattattatttgaggatgatatttaggccaatcgttattaaaagagccataagttaatattaattgttcaagcttatcaagatgattttgtgaacagtaaggtaaaatcgctttaattaattgacgactcgcccaaaatctagcagataaagaattatcgctaactcctgaataacctgtttctaagcgatagggtttatcgcataaatattctactatttcatcaacaaatttaaaaccatttgctgtataagctcgtattagtaaaaattgaatggtttccgaacctgatgataataaattatatttgtcaataatttgagtaaattcttcaggattatttctcgctaaattcgataaggcgatttccattcctttgaagatagcactttctattccatgacctccaccataacttctataataccatacgttatcttcatagggtttttcatcatctttgatagatgtcaattctatgacagatagcataaatggtaaaacattaattacataatcttttggagctttatcagcactttttagaaaaatttcagtatgctgtgtgtctggaattgttgccttatcttgctttaaattataactataggtatcaaaaggatttaaccttattgttagttgtgtatattgctttagaaaagaaggatgaatatttagacaacattgataaatccagtgtaataaccaaatttgcattaaatataattctaatcttcgattaagataatgaccaataatttcacaagtccatgcagagtttttttcagatatagagaaaataagtgtccaaaaatcaccattcatggctaaagtatctcttaaattatctaatttttctttattgagcaaggttaaaaataaatctaataattttctgctcttgtctagttcaaaagagattctatctgctatatatagaaatctatccaaccatttttctgatgagttttcaataaatggttcaattaaaggtgaaacttcatcgggtaattgactcgctgtcgaactgattaggcgtaccgtcttatcaactatcaaatcattatcatctcgtaaccattgttcaataatacctaaatctttagctaacataaaccattgtggctgatataatattccccaagcatgattaaataaagatgactcgttatctgtcagaaataggtgaataatttcccattcttcttctgcggggttctctaaatttgacagtaaactaattaccaattgtttgagatgaaagcgaatgcgaatatcttcactatttaataattgctttctatcatcttcactcgttaatagcttactatttaataattcttctatgtcataaagatattgattaaaattgattgatctttcaaattgcaaaatttgtcgaacttgagcgcgtttaaataaatgttgttcgtcttctcgtaaaaatgataataattgtttttctctagcagtaaatcttcttgcaaaagcataatcaaagaaattttcatgaaaaaatttaattttatcttgctcttgaataagaacattttctgaaatcattattcttgtatcaattaaataatcatcaagaagatacttactaattgataaagtttgattgagttttgtgctgatattatcgcagattttatctattacttcattccattgaactaaatgcttagttttctcatctccataaagtttagtttgcttaaattcccagaacttatcaaataaatcatttgcagtttcaaaatttaagttgttaattgttgaatcctgagatatttgtgctaaaagtcctaaatgtaaaggtaaagataataaatcaacttgcttctgatttaatttacttgcatcaagtcctaaattttgaactgtttgtttaacttgttccgatgataatctctggatttcaactgtttctaaaattccttgcttccctattaaatttttaatccgagagtcattatctaaatcaaatttacgacaagcaactaatacacgcaccttagaaaattgttttgtttgttcaagaagactatgaatacaatcaaaaaactgcggatttcttcctgatacttgactgactgcatctaattgatcaataatcaagactgtttgtttttgggaatacttactaatatttgccagtatgattgtaggagaaagaggtaatctgtattttctgccaacatcatcaggattaacttctgggggtaaattatctatccgaaatacaaaaaaagtaatgttctcttgctctaattttttagcaatttgtaacataactccacttttaccaactcctgcttctcccattagaaatactccttttttattttgagtattaaccagtaagttgaacgcttcttctgcttcttgccttggaatagattgtccagcaattactgtttgtttttctaaaggagataaatataattgattcgctttatctattgctgctaagacatgataatttttactataattacagcgttgataacctcttgtgtctaaatgtttccaaatatcactagctgttaggattttatgaatactgtctaaagcgaatcctgctaaaatatcaacggccgtttgatagtcagtatgagaaggaaaatcattacttttagattcaattaaccgtttgatattatccacaactgtttgacgtagttttctctcactaattgtttctacatatattctttttaatttctcataagaattttcagctacatttataatagcttgctgttgatgacttaattttccacttttaaaatcctcaatcgcttgttcgatttctagttgttgatacttataccaatatttcactaaatcatgaaagctttctcgccaatcttttgcatctaaaaattctctaacaaattctatccaagattgtgaacttcttgctctttctgctagttcctcaagttgataagcgttattaatcgaaataaaataacaatgggtttgattattctcaagttttttcttaaaattggtcaaaatttgtttagtttctaagtcagctaatgtccaacgtccctttgtattttgtcgcttgacttgatgatattctcgaatatcttctctctgaagccaaaactcaactccttctccttcttctcccacaggttctaagcgtatagtagtcgcttgttcatttaagtgatttaaactaatgaactctatctcaatattgtttgctttttcgtcaattaagtctaacaagcagtctattgtccatagaccttcgtaacgatttccaattttatcagttgcgccacccgataaaggcatgatgaattaagatactcgttgaagattttgcttaaaagttttgtaatagttaatagcgatggtgaaatataataatatactccaataaatgcagtttgattaaattaatacacctaacggcataaagccacgaatcacgtcagttaattgggacgaaaatccctggatattttccttgagcaacgcctaacggcatgaagccatgaatcacatcgttgagcctctttaacacttagcccgattttttaaggattgagcaacgcctaacggcatgaagccatgaatcacagcgaaggtgaaaaccctttactgatgaaggcctattttaaagtttacaagaaatccgattgtagagtttaaaactacatgaaactgagccaattttctgattccttcaactgctaaaacccagtccctgtaaacttttcaaagctttgcaagcacctattaaccagctaaaatcgtcctatcccttatcccatcagcattgtggtcaattttctcccttcaatctccttctcgattatgaggtacttgtcaaaccgatgattgaattgaagtccatgcgaaatcaggaggagataactgattcatttcttctacccgataccgcaaaaaacgggtatttcttgaccccagatggtcaacccaatagggtaacgttaacctacctccattatcccttattaaccatcgtctgaccccctcccgataatcctcagaaactaaccgtatcgtcttaattaactggtcactttcccctaaaaataaacacccaaaccgtcttactaactcaggacgctcaaaagtaaactctatcctctcctttaagcttggttgcatcatctcagcctcagaacgaacccaaattaagcacttcaaattcgacaaaatctcctgatagctaggattcacattctctgcatgactaaaatccttctgcttaaaccgtctcatttgacgcaaaatccgcgatttttttgcttcagataacatggcaattgccaattctaccccacaatgacgataaacatccgtttcccccaccaaagacaataacatcccatataccgtcgctggaggaggaacaggataagtccttcccatctcccttgcatgaaactccctaaacgtcacaaaaggaacatctagatagataactaaaggtgtattcattgtgagtcttttaaccccaaatcttgtttaatcacttcctttaaatcggctaccaactcattacgatttcgataaagatgtatctgttttagtaaggatttctcaaaattttctagttctcgtaaatcattaacaattgcccctccaatccataactcatcaggattaatctgtccgcattccacctcattgataaaatcttgagtcaatttaatatttctccctttcccatcaacggattcaaaacaataggaaatataagacgcaaaatgatttgtccattgaaaaactaaactatcaggacaaaaaggataactgaaaatattagcacttcctcccactttcggcatatccataatcccatcaattaatggaaaaatccgagaacaatctttaagatgagtagcattaagcccaaaataatattgataacgagtattatgatattccgtaaaatgaagcgatgtgctatccttatccctaccactttttgcccctaacttcaaagaaccgtcatagggagttaaagaaatagcattattcatacttaatgcccctgttctctgagcagtcgtccctgatttctttcgttttcctcgtcttcgagttgatggttgtgttttatcttctaccgtttcttcttctacagattccaataacgcaaagccaaaaatatcatcatcataaaattgatctgggttaaaattatcatccgttaatcgattaatatgttcatctttatcccatactctgttaacaggataaccttcttcttgaagataaaaccgtaacgcccaccgtagagaacttgaccccactaaagaatgaattttgccatcccaataggctttttgtaaaatggatttattaccttgtcgcatcccgtgacttaaagaggctaagccatagcgagtcaaaactgttccataaagataataatttggtattttattcttcttctgattcatctttaattccttctaattcttgcaaatttttgggtttaggttcgtaactagcaatccctaataatgcccaaattcttaatttttcccaaggcacttgttgaatcaataataaaacctctcttttctgaccttgtaatggtttatttaatccgcctcttgctaaaaaatcagctaaatagtgctgaaatgatatctcatcatagcaacaatttaactctgcccgtaatcgttctgctttcttctgaaagagagggttttttcctctctcagtttttgcatagattttggcaaaatttgccctcatcgcttgctgaaatacctcaataaaagcgagatatttttcatctcgttcactattttttgtcatgaatttaacccctttttgattagataataactgtttaaataaatagtttttagaatcttcatcaatcaatttcttccaaaaattaaaccaccaaggctgtttttgccttaaattttctgcaattagtgaccgaaccagatttacctcaatcagaatattattagggtaaatatgttgataattgggttgaaagtattgtttaacttgttgataggtagtaatcatttccttatcaatttcaatctcttcaaccatcgtcaacactcgttgataagatgctttattcattttctcatacaaccaaacttgacaagcttgactataattttcatttgcttgaatttcatccaaactataataaagcagtcccgcttcgctcatattagtaacatgaagttgttgaggttctaattgctgtaatcgccatcttcttcgagaagcatcttcaaaattattaatttctggaatcacaacaagataacgatgaggtttccttgaatttacatcctcagacggaaggtgaaaaagacaataatgacaaacaacaggaacaaataacaaggctaaagcatattcaggcttttcttctagtttagtctttttgtctgctctcgcatgacggacaattccccctaaatacaaccaactggtaatttgaagataatcctgttttaattgttgagtatctgtgtcgcataattctttagcaaaggtttgatgtgcataccatattagaggtttgtaggaataggaaacttcacgttcttcaacggtgaaagagatttttttagcttctcctgcttgataaaatttattatgacggagaaaaactgcttttattgcttcattaagctcaattttttgtctcaactctgaataatcatctaatcctgtcaaacaaatcaacccattatcatccagttgaaaagattccttcagcaaccaatccaacgcactaaaatcaattgcttcccaaaataaatcaatagtatcaggggttaatgaccatgataaatttccctcacgctgacgaaaatcaggatatttttcttctaatcgctttaaagttaggtaaagtccggccattcctgcacggtgcatgatggtagtatcacaagcagtcaaagataaggaaattttgctttgagttgcaaccgtcatggggttttcctctcatctttaggacgagtcgccggaacaaatatcccacacatcattttccgttttcccccgattccttgttcttgcaaggttaaagagtcctctggactcagttcgcttatcttaacgccaaaccctcttattttaaactcattgccttgcttacgaatggtcaattgtcgtcgttgcggtgttccattctgtcgagtcagaagttctacattcccttgtattgctaaactatccatttgacgctgaactgcttcaagaaagctagaggagtcttgataacctttaataacgactaatcgagaataaagactatctgaggaacgtattgcttgataatcgggaatattcagttgataagattcttgtccaatttcaaaagtttgacctgttaggtaaggataaattataggaatttgtaaatgatgaatgcgaatttttagacaagaattaggagtcagttcaagaaacttattctgagtaggaatcccagcaatgggatgaatccccacgtctttgagttcatgaagcgtcgggcaaattcgacacaaagcagaataaataacatagccattatcaagaggaatcggtgcacccctcagcttaaaaatcatatctagatgttcttcactgttaataactgtatctgtcattattgtcagcaaaaaattatttatattttttatgaattagtttaaaataaactataatagtataggataacttaatataagaatttgggaaaactcttgatgtaaattttaagaaagattttatcaaaaaaattgtagatgaattaatctccgatggacatagacataaacaaaattcaaccctataccaacgatgagctatggagtccagagaaatttcccatgcctcctcgaagtcgtttgcatcatttacaaccgatggggataggaaccccaatggttgagagtttaaccagttatgtgactcgtttggctcattctcatggggttcatgtgggaactctaatttataaagaaatcatcccttgtatttccaaaacatataaaaccaccaatttactttgcttacgcaatcaaacaggagcaatcaatggttgtggtcttcttgccgaagattcggttcaagctttatcagaactcaccctatatcaaaatttatctaatttaactatgttgaattggaaaaacatttttccaaacagaaaattaatccgaaaccataaggcatggtgtccattttgttatcaagaatggcgaactaataatcaaattatatttgaccctttaatttggcaaattgaagtaattcgattatgttcaattcatcaatattctttacaaacactttgtccttcttgtaaaaagtctgtatcagtgttatcacctaagaatcaattgggttattgttctaattgttctaattggcttggaaacattgaagattatcttaatacttctttatcaattcataccaaatttaaagataaaagctattttttatggattgcggattgtttgggaaacttattatcttttccttcaactattaaatctccctcaaaaaaacagatttctcaaattattcaagctattatccaccaatcaacaaaaggtaacattgcagaatttgctagatgggctaatatgccgaaaaatacggtatggatgtgggttaaaggtaaaagcttacctcaacttagtcgcttgttagcactatgctatttgtgtcgcgttgatttactagattcaataatcaacgagggaaatatcacaaacatgattcttcatcaaaagagtattccttcttctgtaaatgaacgcccgaaaatcttcaagaacactttaaaccatgcgcaaattcatgctgctctctcagaagctttccaagaaacccatcctcgcccaatgactcaagttgctaaacgattaggaatcagcaataaagtgctgcgaagacactttcctgagctttgtaagaaaatttctcaacgttacctcatttacaaaaaacaatctcgcttggaacgtattcagaaagtttgtatagaagtagaaaaagcagttaaacaacttcaacaacaaggtatttaccctagcgaacaacgagttgcattacatatcggtcagcccggttgtttccgagataaagaagtcagagaagtcctaaaccgaactcgacgtaattggagattgttagatacctgacaagactatttgacttaaaatttttcaggcatagctttgctgtcagattttcaggcataaccttgccgatgcggcaaaaacaaactttaaataatagaaagtctcgcagcatctcttaaaatggtaatgggggcgg

SEQ ID NO: 887 - DNA, 32767 bp, Nostoc sp.
  source 1..32767: mol_type = other DNA
acaaaaattgacggtctaatattagcaatttgaatcgagagcataagctttatgctttcaacaatttgcgacaacaactataagttgtcctaaatgacaaccaatagttgaccaagatatgctttcaaagcctcattctttcgttagggcgatcatagcaaaaaaactattgacaagcattaattgacctaatgtgaaaatactaggcattagttgaccaaaagttataaattaaaaatccataaattcacatttaattaactgtgtgatgtaaacatagctttgcatctgaataagccagatgctaattctctcgtgagtgcgatcgctcctaaaataaaactgcaaaattatatgcttgcggaaattgggcttgatgcgatggtctgctggtcgcgctgtagcttctctgataggctgaaaaaagacctgcaagaagctcgcgctggcaaattattatgccgtccaacatcgcagtagaaatattaattaagttccaaggtagcaaaatagacacagttccacaggaaaacacttatttattgatatagtgaaatgtaatttgcacaaggttttgagagaacactaataaagagacaaaaccctaacccttctaagttactgttctaggatgctgtaatgtctttgagtgaagtgaataccagagaaaagttaattgatccggcgttagaaaaagcaggatggaatctgacaaatcccgatcaggttataatatatccctaaccagtgagaacactgcaaacaatgacctaagctgggttctcagtctaaccaaagtagttggcaatgacaatgaggacaattttgcacaagagaatattgatgtattaaacaaactctggcatctttaaacttttctggcaatttccatctatgacagccatattacttcaaagtgaggaatatgtagacttaacgtttaagctaagaggcgcactgattcctcttgataacggttatgttatctatagtgctttgtccagaatttgtcctatcctgcatgaactaaagtcgattgggattcatccaattgctggaataccaaccaagaacaatttacttgaactcaccactcaatctcgtctaaaaattcggatttatcatcaacacattcctttaatttatccttatttagcgggtcaagcttttcatataggtcaaaatttttatcagctagatattcccgactacaaaccgttgatttcttcagaaagtgtctattccagattagtgataattaaaggatttcaagacgctactaactttattgaagctgtgcaacggcaactggataatttaggaatacaagggaaaattgaactacttacccgacaagatggaacacctcaaaaaagacaattaacaatcaataaagaagggaaacagtttaaaattagaggatttggcgtaaaaatcagcgaactcaacccagaagattccttaactttacaagaacagggtattggagggaaacgaaagatgatgtgtggaatatttgtcccagcgactcgcagcaaggaagaagaggaaacctgatcatggttgctacccaacccaaaatttccctatctctcgatgctgcggatacgacaataatgcaccgcgccggaatgacgggactttacatgactttaaagcgattagaaaagcaatatacctcatctcgtcaacggggaggacatatatcatggtttttgactgctgataccattaagttattctgggaaggaagtgatttcgttgccctatcgtggttgattaaggagtcttttcaactagatgatacaggtttaattcatttaacagcattgtctaatgctgcaatagatttaaggcagaaaatccatattcatgagggaatatgtgctgttttcctgcgtcataatcagttttatcaagcaggaaagatagttaatgctgaactaacggttgaagaaaaaaaagtcgagtatcgatacaaatccctaacttggtatgcacatcaaacctttgcagaaaagttatgcgaggcagatacccaacaactcagagaagattatgttcaaatgacgagttggttgtatttaggaggaattgttcgccatgctaggacacagaacactacaaaactggaagaaaaacctgaatacgccttagcattattatttgtaccagtagtttgtcattattgcttacttcatattccatcagaagacttgaaggaaaagaaaccccatcgctatggggtggtaattccggaaatcaatgattttgaagatgcttctcaaagaagatggcgattacagcaattagaaaccaaacagcttaatgttagtagccttggtgaagcaggattactttattacagcttagacgatattcagcctgaaggcggctactatcaagcttgtcaagtttggttatatgaaaaaatgaataaagattctcgtcaaagaacattgatgagtatagaagaaattgaagttgataagaatactttaatcacttatcaacaggtgcaaaaatattttcaaactaattatcagcaaattaaacctaagcaaatttttattaaagtgaatccgattcgctccataattgctgataatttagtaaaaggaatccattggtggtctgatttttgggaaaaattggtgatagaggattcaaacgaatatttatttaaccagttatttttcaatcgagaaggattcataataatggcagagaatagtgaagaagacaagcattatcttattttccttaaggtgtttcagcaagctatgaagggtaactttgctaaaatgtatgccaaggcagaggcagggaaagaccctccaattaagaagaaagttgaacgattaagagcagagctaaactattgttatgatgaattgtcgtttaaagaatatttgtctgactttttagtaagagggggattaaataagtatttcaatcagcatcaagaagagatagcactactaattaaaaaaataccttggcaagaattaagaatttggtcattgttagcgatcgccagttataaacctaaagataaacctatcgaaatgaatgatgagtcagaagaagaatgacaataatatccctaattattatctttacggaacagtcctcactcgttatggtttagcgtcattaaatcatgacatgagacgaggaaataagactactctgcaaaaaggctattggaatggtaaaattcattcttttgtaggtgcaaacgcaattcgttgggcgttacgtttttatcttcaaaagcaaggttacttagttaatcgagtttgggatgaggatgaacatattaatcggttaacaagtgaagatttcgacccagaacaattttatgatgatgatatttttgggtttgctttattagagtctgcggaaacagaggaggagacttcaacaacaaagaaaaaaaagaaacaaaaaacagtcagcagtcctaatcagcgaattggtgctttagcaatgaatatggctgtgtccctaacgccttatgatggtgcagtcaagttaggagcaaaaagtggcagagataaagatagcacatcgctccactttacagagtatcatgcaactcgatatcaatattattttggaatcaatcccactcatctcaaagagatgtcgcggattttacctctgatagatgggattatggatatgcccaaggtaggagggagtagtaatatttttaattattctttctgtccagatagtttggtatttcaatggacaaatcattttgcttcatatatttcctattgctttgaatattgcgatcctaagactaaggaagcaaaacttgcacaagagtttatagatgaagtggaatgcggacagattgaccctagtacattatggattgggggaacaattgttaaggagttaaagcaattggataattttgataattccccttttaatagagcgcacatttatcgtaatcgcaatgaactggttgaagctttgaaagcagttattaaaagagatttgggtttacaagaatcaaaatgattgcaccattaattctctatttagatgttccatttgcgacttttagggagtcccatgcaagggaaatggggaaaacttatcctgtacctcctccagcgacagtgtatgggatgttgttgtctttggtaggggaaacggatgtctatcgtcactgtggggtagaattggcgattgcgatgttatctagccccaaaaagtcccgaattttacgtcaaatgagacggtttaagaatgctgattttagccacccagagaatgttattccctgttatcaagaaattttgtctaatgtgaagtgtttgatctgggttcgttctgacggggagaagatagaactaagtttaagggagaggatactgttagcgtttgaccatcctgagctagtaagacggtttggttgtttatttttgggagaaagtgaccagttaattaaaacaatcaaacttgtctcacaagattatccagagggggtgagacagtgggcgattagggataatcgaggcaggttaactttaccctattgggttgaccatgtggggtcaagaaataccagatttttgaggtatcggattgaggaaatgccaagctcactaccccctgatttggcgtggacgatgattacatctccaatttgacaagtatctcttatggtaaagggaatataggctaaaagaatggcaggaaggtttacacggtaaggtttatgataatttaggacaggaaaaaggtgcttgccatttttgggaaagtttatcggcactggttttgaggggctgaaagtaagggaaaccttggtaagttttgtgtttttggtttctcgatttggaaggtgcttgtaagattgtaaatgaagcttcctgtgttaagggttttcacctttgctgtgattcgtggcttgatgctgttaggcgttgctcaaatagtttggactggtgttatttcagtttttgagtggtgattcgtggcttgatgctgttaggcgttgctcaagagaaaattgcgatgtttgaagccaacttggcttttaggtgattcgtggcttgatgccgttaggcgttgctcaaagcgatcgcccactggtttaagatggagtgcgatcgctacttacgctcctataccagagaggatttctattaggagagtaggaaaaactattgctttacttggattacttgaaaaacatctttgaaatccagtaattgaaactgcataagatttttagatgtggcgaattaagtgagcaacagagttgcttgatgaatgtgctgaagaagttatagccaaaatgcacatacacgttcctatatttgtttaaattaatgtagattctgcacacgtataagcaaagctcaagataatgcgaaatatagttcagatgtgatatatttctctgccagatgccgcttatgaaaattttgttggttgaagatgacagattaataagtacggcactggttgatttgctcttagcaaatcattacactattgacttagctaatgatggggaaacgggcttatgtctggcgatttcggcagaatatgatttaattttgctggattggctcctttccaaattggatggtatgagtttatgccgtcaactgcgatcgcaaggctatgtcaagccaatcttgctattaactgcaaacaattgtaatgcaaagcttgtcgaaggattagatgcaggagcagatgattacgtcataaaaccttatgacccggaagcattgctggcgaagattcggtctttattacgtcgtcatgggtcagtagcatcatccacattaatttggggaaatcttactttagaccaaatctccggtaaagtcacttgtaacgagcaaataatttcactcacggctacagaatacaaactcctagaattgtttttacaaaatcccaatcgtatattcagccgcaagttaattatagataagctttgggaatttgatgatgcaccgattgaaaatgcggtaacaactcatattaaagatttacgtaagaaactaaaagcagggggtcttgctggagatatcctagaaactgtctacggaatgggttatcgcttaaatcccgctccagacgactccaaaaatgtagcaacatcacagccacacaattgggagcaaaaaccccgcacaaaagatttaacttctgttaatcgagtattagaacgatttcgtaactcatttagtcaacaagtcactgtattagaacaagcaaaaactgcactgttggctgggagtttaccaccacagctacaccagcaagcactgcaagaagctcataagttggcaggttcaatgggaagttttggatatccacaaggttctacactggcacgaaaagtagaacacttgttacaaaataatcacaccttaacagatgatgaaattacacagtttgaccaactggtaacagcattacaacaggagttggcaaagccaccaaccacaactgctcaacctgcttctttgcagcaaacttaccgcgtactggtgattgatgatgatactctgctgacagagcagttgttaacccaggcagatgcttggggaatgcgaataaaaattgctcctgatttggcaactgcgcgatcgcgcctagctttagccactcctgacgcagttttgctagatttgagcttccctagcactcaagaagatggattaatgctgctacgggaattgggagaaaatcacccgaagttaccaattattgtttttactgcacgggatagcctagctgatagattagcggtgtcacgcttaggcgcacggcaatttttacataaaccatcgacaactaagcaaatctttgaggcgatcgcgcgtgtgctacctcaagccaaaccatcagaagccaaagtattaattgtagatgatgacccggtaatgttagctggattatcgcaattattaaccccttggggattagaggtcattactttatctcaacctcagcaattttgggaaatattagtgaatacatcaccaaatttagtgttgttagatttagagatgcctgtagttaatgggttagagttgtgtcaagttgtgcgtcaagatgctcactggggagatttgcccatcttggtggtaacagcccatactgatgctcaatcactacaacaagcttttgcggcaggagctgatgattttattaataagccagtgctaggcccagaattggtgacacgggtactgagccgtattgaaagaacgcgacggaagggataaaggggtaaggggtaaggggtaaggggtaaaggggggaagatgaaagtttatcggcaattattagcttatggtggtgctattggctcaactgcgatcgctttggtattatcgctttggttagaaactctaatatatagaactgttggcgcttttttctatatagctatcattttcaacacttggtatggtggtttgcgtccagggatagtgacaattattctttcgacactggcaattgattatttcttaattacgcctcagtatcaatttatcccctcagatccacaggatatattgcggttaggtctttttgggttagttgggttgataatcaatcagctaactggcaatttttctaaaagtaaccagaaaattcaacaattaaaccaaaaattggcccaagaaaatgccgagcaactgaggatggctctatcagcagcacaaatgggaatgtgggactgggatatggtaagtggacaaatcaactggtcgccagaacacgaacggttatttggtttggcttttggtagcttcgatgggagatatgaaacttttgatcagtgtctgcatcctgaagatcgtcctctgctcaatcaagcattacaacaggcactgcaaactcatagtatttatcagtgtgaatatcggatagtttgggcagatggtagcattcactggattgaggcacgaggacaagcattctataacaaagcaggtgagcctgtccgcatgagtggaactgtgatggcgattgatgaacgcaagcaggcgcaagacttactgcaacagcaatttgagcaacaacgcctagtgatggagatgtcccagcgtattaggcgatcgctgaatctacaagacattttacaaactactgttgatgaagtacggcagtttttggggtgcgatcgcgttattctgttccagtttgcacctgattggagtggcactgtagttgtggaatctgtcgatcctcattggacagcgatattatctaccgatatctacgatccttgctttggggaaacatacattcaaccttttaaacaaggtctagttactgcaaaatctgatatttatactgctggtatcggctcttgccatatcgaactgttggctaaataccaagtgagggctaatttagttgtgccaattctctacagagatgaattatggggattactcattgcccatcactgtgcggctccccgtgaatggcaatcaagggaaatagctctgttgcagcagttaggagaacaggtaagcattgctatccagcaagcagctttgtttgaacagttacagacccaattaagggagcgtcaacaagcagaacaaagtttacaagaaagagaaataaccttacgcttatttgtccagtatgcacctgctgggattgcgatgtttgatcgggatatgcgttatttaatagccagccaaagatgggtggacgactatcgtcttgattcagtggcatctgttatagggcgatcgcactacgaactgtttcccgaaattacagagcgatggcgacaaattcatcaacgctgtttggctggggcaattgaaagatgtaatgaagatttgtttatgcgtccagatggcagccaacagtggatacgctgggaaactcatccttggtatactactactggtgagattggtggcattattatttttgctgaggatattacagagcgcaaacaggcgcaaatttccctgcaacaactgaatgttgaacttgagcaacggatagccgaacgcacagcacaactgactcaaacaaatgatcgcttgatagaaacggtaatccagcagcaacaaacccaacttatacttttagaacaagcacaattactggatttagcacacgatagcatcattacccgtgacttaaacggggcgatcgccttctggaacgaaggagccgaatatatgtacggctggacgaaagccgaagcattggggcaaataacgcatactctcctcaaaactcggtttcctcaaccattaactcagattgaggcagaactctgggaaacgggctactgggaaggagaactgattcatgtaaggagagacgctcgaccgattactgtagccagtcgttgggtgttacaaaaagacaacgctggtagaccaataaagatcctcgaaatcaataatgacattactgagcgtaaacaagcagaagcagctttacagcagtatgtacatgaaattgaggatttgtacaataatgcaccctgtggttatcactctctagatgctcaagggaattgcattcggattaatgatacagaactgaagtggctaggatatagccgcgatgaaatgttacacaaaaattttttagatattgccacttctgagggtaaaaaaatatttcaagaaaacttttttaactttaagcagcagagttcgattaataatttagagtttgagattctgaacaaagatggcacaacccgatgggtaagtgtgaatgccacagcaattaaagatgaaaatggcaactttgtcatgagccgttcaagtatgtttgatattagcgaaaagcacgctgcgctccgcgaacgtaaacgtaccgaagcaattctgcgccaatatgagggcattgtatctagtaccaaagatggcattgcactattaaatcataattacatttatcaaatcgttaatcaagcttacctagactggtgcaacaaacccgatactgaagttttaagttattcggtaagggatgttttgggtgaaattttatttgataacttcattcaggctcggttagatagatgtctaactggagaaacaattcagtatgaaagatggtttgattacccgaatttagtaccgcaatttatgagcgttacttatacaccttacctcgaaccagaaggcagcatttcgggtattatcgttagcctgcgggatttgacagaacttaaacaggcagaacaaatgctagaacttcaggctgtcattacccgaaacatggcagaaggagtctgcgtggtaagtgctactgatggcagtattgtctatgctaaccctaaatttgagcagatgtttggctatgacttgggtgaactaaatgggcaacacgtttctatcgtcaactatgccacccaatcagtaactgctgaagatgtcaatcaagctattcgctctgctgttttacaaaaaggtgaatccacctacgaagttcataatgtcaaaaaagatgggacttcattttggtgtagtgcgacttgttctgtctttaaccatcccgactacggtgatgttttagtagcagttcagcaagatatcacagatcgtaaacgtattgcagataatttacgtgaaagcgaagaaaagtttcgccaactggcagacaacattcaagcagtattttggatgacagatattcaaaatcagcaagttctctatgtaagcaaagcttatgagactgtctggcaaaaaagtagtgaaaatatctaccagaatttttcagattggttagattccattcacccagatgatcgccagcttctcgatattgcatttactcaacaatcacaaacaggtcaatctgataccaaatatcgcatcatccgccctgatggttcaatgcggtggattcgcgatcgcgcctttcccatcaaaaatgaaatgggggaaatagtgaggatagcgggtattgcagaagatattacagagcaacaaaaaattgagcaaattaaaactgagtttattagtatagtcagtcacgaactgcgtaccccattaactgcaattagggcatcactcggcttattaaatagcggtatctacgataaaaaaccagataaatttaagcgcatgattgagattgctgccattgatagcgatcgcctggtacgtttagttaacgatattcttgatttggaacgcttagaatcaggtcgtgctgttttagacaaaaccacctgcaaagcagccgatttaattacacaagcagtagaaggagtaaatgcgatcgccaagcagcaaaatattacctttaatattcaccctactaacgctcaggtttgggtggctgctgatacaattattcaaacgcttaccaacctgttaggcaatgcgattaaattctccccccctgactctactattactttaattgctcaacagcagacagattatgtactgtttcaagtcacagatcaaggtcgaggtattcctactgataagttagaagctatctttggtagatttcagcaagtagatgccacagattctcgtgtcaaaggaggcacaggcttgggattagcaatctgccgtactattattgagcaacacggtgggcaaatctgggcagagagtaaaattgatgttggtagtacgtttttctttactctgccaaatactaaggaataggacgcagggtaagaataactatggactatgcgaaatgactaaaaaaatattgattgttgatgatgaagaaagaatccgcgaactggtgcaagcttgtttagaagatataggcggatgggatacaataacggctgcatcaggagttgaatgtttaacaatcgctccagcacaaattatagatgcgattttacttgatgtttctatgcctaatatggacggatttgcagtttatgagcaacttcaagcaaattctgcaaccaaatcgatacctgtaattctactgacagccaaagttttgccaagcgatcgcactcactttgctcagatgggaattgctggtttaatcaccaaaccttttgaacccactactatttccgcagaagtcgctaacattttaggatgggatgattaattttaaatttgtgtgaagaaatttatttctttattagttctttatttttttcaaatatctttcttatttacagataacaatatcgactattcccagaaagataatatatgactacttgtcaagttgaaagaattgaagaagcaataacatttaccttgttgccattccatagtagtgctttaggacgcattaaagataaacgaagcgtttcagctttgcatccacagaatgtaatgattcgtgccgttccctcccaaaagttgagacagattgtagagcatcctctgaccgaaagagaactttgtgttttgaaaatgatagttgatggcaatagtaattttgccattgctcaagatttacgtataacagtaggaactgtcaaaacgcatgtacgcaatattttatacaagcttaatgtggatgaccgtacccaggctgctgtagtagcgctacgttctgggttagtagagtaatcccaattcaaaattcagaaagacagactttattcgtattttttggagttgataatgactattgccaacgaggcaaatatcactactaaaacaatcatgctcattgatgaggaagttaatgtacgagagattgtagaactctgcctcaaagatttagcgggttggaatgtaataatagccgattctcccttaaacgggctgcggatagcagcactatatcatcccgatgcgatcatcctggatgtatcaatgcaaggtatgaatagttttaggtttatgaataaactcagaagtaatccagaaactgaagctattcctgttgtggttttgagtgctaaagcgcgatggattgattcacgaatccttcaacaatataaaattgccggagttattcttaagccttttgatccagtgaaaattcctaatcaaattactgcactactaggctgggatttaataatgccagttgaaagttaatcaagcctaataatatcatttgctgcttttatattgttaattttttgataaaatttttaattaatctatcaaataattagtaatatcgtgtgcggttaaagacttatccttaaggcaacagaggggcagatgagaagggtttcgacctttttgcatagattggggaattataactaaattatccgaacatgatataacttttataaaataatttattttagtaccaattcgttttaaaaaagccacggatagctaggtagaggcgcaaagccttgtccttaaaaaataattgatgtgttgcgattatttttagaattgggataatagcgcttcttcgtgaagctgcatatatttacacccccagccacgccgttctccctgttgttgccagtagtgtagaactacaagaaaatgtatttaataaatatgtaaatttatcaattaattttgggctaaatacaataaagtcactgatgccactactatgcttttcaattgtttatcaaatgatgaaattgacttaaagcaaattctgtatcaaatcagaatgataactatgcaaattcaccactcatctcaactgagtgaaattttgaaagtaatcgtcaatgaagtcagaaaaatgttaaaaagcgatcgcgtggtgatttatcgctttctaccagatggagagggagtagtagcggaagaatctgtcaatcccaaatggatatccatccaagaacaattagtatacaatccatattttcaagctgatttgataaagcaatatcaagccggacaggttgatattattgaagatattaatgctcaaccacttgctcctatttataaacaattattaactaaattacaagttcgggctaagttagtagtaccaattgtagtcgatgatcaagcagttgatggaaattattcatcttcttctcatctgtggggtttgctgattgttcatcagtgcagcagtccgcgtcaatggtatagtttagaagttgagtttttacaactactagccgtagaaatagaaatttttatccagcaatctcaaaaatatgagaaattctggcaactccatcaaaaacgacggcacaagtttaggttagccaggataaattcccgaaaaaatattagagaaactgcatttgcaaatcaacaagaaagtatttgtcctaccctctgccatgtgccatcagctctttgtcctttagcttctaccacctgttctgtacctactgtcacctcaaataaaatagcgatcgcagatttgatggcatttgacagattacaaacgcccatctggatttatgatatagaaaattcacggatgtggtgggtgaaccaagctgcactgcatatttggaatgctcaaagtcgagaggaaatactcaagcgcaactttagcaatgtttctgagtccacccgcattcgtctacagagctatatacatcaatttcagcaaggaaaaattatcgccgaaaactggacattttatccagaaggtcaacctgtgtctgttcgctgcttgtgttctggagtgcaaatcgaagatggacgcatggcgatgttggtggaagggacaacccaagttacagaggaaattgatcaagaaatcctccgagccattgaagggttaagtcataccaccttaatgatttcgctgtatacaaccgatggtgtacctttgatgcaaaaccccgcagcttttgattgttacgaagatacgctacacccatctgctggggaaaatgcttttttgcgtcactttgttgatcccaatattggactacaagccttgagtgtaattaatttaggtgaattttttagagtggaaactcaagtcttcacaaaggcggggattcgttggcatgagatagatgtacgttgccctcaagatcccgtcacaggtaacaagatgatattggtgaacgaaaaagatattactaaggaacaaattgctctgttagagcgccaacttgcccaagaagaattgcgatggcaggaagctttgctgcgttcaatgactgatagttctttactggcgttttttgtagttgataatcgcaccgatgaaattctctactttaatcagcgcttctgtgaaatttgggatattgaacacctagaagcgaggatgcgtttaggagagttaaaaaataatgacatcattcctgactgtgtatctttgattgctgatgtcccagcatttgccgaatcttgtaagccgttacagtcccaagataatcgctgcataattgaggatgaaattttatttgttgatgggcgcacaattcgccgcttttctaaccaaattcgggatagtcgagataaatattttggcagattatacatttttgaagacatcacctcacgtaaacaaattgaggctgcactcaaagccagtgaagaaagatggcaatatgctttggaaggaaatggtgatggtgtttgggattggaatgctcaaaccaatacagtttttttctcgcgtcgttggaaacaaatgttaggttttgaggaggatgagattggcaatactctcaacgagtgggatgagcgggttcacccagatgataaagctcaagtttacgaagagattgagaagcattttcgcggtgaagcgcaacagtacataagtgaacatcgagtcctgtgtaaagatggaacttacaagtggattctagacagagggaaaatttttagtcgcggtgataatggttcgcctttacggttgctaggaactcatactgatatcaccgatcgcaagcggatggaagaagcgctacgagaaagtgaggaacgttatcattctgtaattacagcgatgactgaaggtattgtcctacagcaagctgatggatgtattaccgcttgtaatgagagcgcccaaagaattttagggttaacacctgagcagatgatgggacgaacctctattgataagcgatggcaagcgattcacgaagatggttctccttttcttggccaaacccatcctgctgttgtcaccttacaaactggacaacctcaatacaatgtcatcatgggtgttcacaaacctgatgacagtctcagttggattttgattaattctcagccattatttcaaccagatcaagcaaagccttatgcagtggtagcatcctttacggatattaccgctagtaaacaggctgggcttgccctcaaacaacaaatggaacaagaacgggtggtttatgcaatatctcaacacatccgtcaaacattagatttggacaaaatattacagactactgttacggaagtccggaattttctgcaaagcgatcgcgtcatcatctaccgctttaacccagattggagtgctgtagtaattactgagtctgtagcagaaccttggcggccgattctgaatatgaaaattacagagagtaactttattgaaactaaaggaaaattatctgggcaaagtacggtagaaattactcccaatatctataacgcaggttttgctccttaccatgtcgagttcttagaacaattgcaagttaaagccaagttagttcttcccattctacataaaagtaatctatggggtttgttggtagtacatcattgctgcgccttccgtgaatggcaaccaactgagattcaactactgcaacaaatagccacccaaacggcgatcgctattcaacaatcagaacttcatcagcgattgcaaactgctaacagagaattgaaaaatctcgcaatggttgatcaattaacagggattgccaatcgccgacggtttgatcaaaagcttgattgtgtatggcgacattttttgcgggaacaaggtagtgtttcactactgctatgcgacattgactatttcaaacgctataacgatacttatggccatgctgctggtgatgactgcttgcgtcttgttgctgcggcttttcaacaaactgtcaaacgttctactgatttacctgctcgttatggtggagaagaatttgtagttatcttacctaataccgacactgaaggtgcttggcaagtcgcccaagaaattcatcaagccgttcaacagttgaatattcctcactctgcatcagatgttaagccttatgtcaccttaagcataggtattgctactgttattcctaactctactctaacgccattaaatttaattgaagccgcagatcaagctctttatcaagctaaagcacagggacgcgatcgcgcttttattaatgaagaaggggaaaggggaaaggggaaaggggaaagggaaccccatatttgaaaataggggtttcagatatggacgctgatttttatcgcgctacgtgtctggtaaaatcttcttttaatattctccgcaattaagataagggctttataccttgtggggaaaagttttttatcctttcctttgccccttaccctttccccttttcccctttttggtaacatttctatcccaacgctagaataagcttttttattttgtactataacttaacattcctcaacttattttatttcttttccatttattacaatcttccttttctttatcagttctttattttgtttatatagattgaatacgttgaagttttaagagataagaaatttcaacgcaattaatttatttaacaaaactataatattatggcaaactgtccttgctgttctaatcaaatgcttgttcatacacgtacacaaaaaacttactggttctgccgttcttgttggcaagaaatgcccaacttaagtttagaagagaatcaaaatttattaggcttgtctataaaactgacatcagcattgaaaaagcaatttcattaattgaattaagttgccgtttctgtaaatttagaaaaaatacttttggaataatttatatattaatcaattatttcaatataaattgtttattttcatgtatcaatttgtgattaaaaaaccttgcttgatgaatgaggtatagatatgtatagcctctcaaaaactataaggacaaacaaggatgtaaaaattctagtagttgaagatgattactctcttgcactcaacttgcaagaacttttagaaacatgggaatatattgttgtcggtattgcaaattctgcggaaagtgcaattgagaaagcaaaggcactgtatccaaacttaattttaatggatattcaattgcctagagaagtagatgggatgcaggtagcaaaacaaatctggaatagtctaaaaattcctattgtttatattacagctttttatgaaagtaaaacttggggcagtacagaatttctacatcctttcgcctatattatcaaacctgtaacttatcagcaactttacgttgcaattgaaacagcgctagaacgttatgcaattgaagaattttcaaatagtgtactccaatgtgtaggtcatggaataattgttgttgattttcaattaagagttagctatctcaatcaattagcagaaattattacgggatggcagttaaatgatgctcaaggcaagagcttcagtgatatcctcaaattaattgataaatcaacacaaaatctgattaagaaggctatagtttcatctcttcaagaacaaaccattcttgataaagaattgagtacattaattgttaataaaaatggtgcgactattcctataactaatagaattacctctctaatcaacagacaaggatttattgttggtgcagtaatagttatccagaatgatacataaagataggttatgaattaccaagatttagaaaaacgtaaagcattaattgtagatgatgaagggtgcaaccgactctgcattacttatgtacttaaacaagaaggttgggaggtaaatgaggcagaaaatgggcgagaagcaatagaaaaagttttggcatggcaaccacatctattgattttggataaccaaatgccagaattaacgggagtggaagtttacaaatatctccaattacatggcattaaactagcggttgtcttaatttccgcagacactgatttagagaaattagcctcagaggtaggtattgcttattatctgccaaaaccttttgaacttgaggcgttactaaaaactgttgattctgcttacgaaaattctttcaattaaaataagctagtttatgaaaatatcaaaatcaaaatttaattgttctgtttgctcataatcaagttagaaaatgcaaccatcagacaaactcaacattacagaatttattaccttagaaccaatcaatgtcagcaactgcgatcgcgaaccaattcacataccaggattaatccaaccgcacgggttactgctgacattgcgtgaaccagaactaaagattttgcagattagcgaaaatgttgagcaactcttgggttttacccctaaacaactgattgggcaaccattacgccgcctatgctccacagcaaaactaaatgaaatacgccaatatatccaaaaagataatttagaggcattttgtccattagaaatgaaaatacgcagtgcagcaatattatcacctaatcaaaaagtgcattggcagaacttcaaagctatgctgcatcgcagtgatggagtgttagtgctggagctagaaccgagtctaattacgaaaaatcaacagtttctcaagttttaccacattttaaaaggagcgatcgcccaaattcgccaaactcaaagctttgatgatttactgcaaaccatagtcaaacaagtcagacaaattactgggtttgagcgcgtaatggtttatcagtttgctactgataatagcggcgttgtagttgccgaagacaaagccgaacacctagagagttacttagatttacattatccagcctccgacattcctcaacaagcccgtcaattgtattacgagaattggctgcggctgattcccaacgctaattatcaaggggtgcggctaattccctcccataatccgattaactcgcaacctttaaatttaagtcaagctcatttaagaagtgtatccccgcttcatttgcaatatctgcaaaatatgggagtaacggcttctatgtcgatttccctaattaacgaaaaacgactttggggtttgattgcttgccaccattacactcccaagtacgttgattatgaaacacgcaaagcttgtgaatttttagggcagtttgcttctgtggaattggtttatcaacaagagcaagagatggagagttatcgctcccagataaaatctatccaagaacaattgcgacaggtattttctgctaatttcagctttattgaaccagtgcttcgtcataacgaagttgagttattgaatttggttcatgctcaaggagtcgcactcatcttagataatgaagtatctctatttggtcaaacgccatcaacatatgaagttcaggaattgattacttggctgtcacaacaagagcgccaaccaatttttgttactgattccctcgccaaaatttatccgcaggcgcagcaatttacaactattgccagtggtgttttagcaatttctattattctacgccaaaaatcttatcatcttgtttggtttagaccagagcaaattcaaacagtcaattgggtaggagatccccataaacctgtctctattaatactgaaggagaacttagcctaactccacgtaagtcctttgaactttggaaacaaacggtacaacaaacatcgctaccttggcaaccattagaaattgaagctgcaactcaaatgcgaaatgctctcatgctggcagtgctggagttttcgcaggttgctttagaacaagccgcagaacgtgcagcgatcgccaatcgtgctaaaagtcagtttctcgccaaaatgagccacgaactccgcactccacttaatgcaattttgggttttactcaattaatgtcacgcgctaataatactcccaccgaatttagagaaaacttgaatattattacccgcagtggagaacacctactgacattaatcaacgacgttttagagatgtccaaaatcgaagctggacaattgatacttaccgaaacttactttaatttgcatcggctgttgcgctctattaacgatatgtttgcgctcagagcctctcagaaaggtttaaatcttatcagcgactgggatgctacagttccctgttacgtatgtgccgatgaagccaaactccggcaaattttgatcaacttattagccaacgccattaaatttaccgccacaggaactattatcatgcgtggacgggcttttctgtctagcaatcgccaaaagcaggacacagcaaaccacaacaccattactacgtctaattcccctcatcttcaaccattcgtactacacctagaagttgaagatactggatgtggtattcccgcttcagaaacggaatctatttttgaagctttcatgcaaacacaacagggtcgtcaagctcaaggcacaggtttaggtttatctatcagtcgccagtttgccagattgatgaatggcgacattagcgtaaaaagcactggcaatcaaggttctactttcacttgtcaagtattactgcatttagctgactcggtagatttaatcgattcctctctcaagccccatgtgattggcttagaacctggacaacccacttaccggattttagtggctgaagatgttgtagaaaatcgccaactactgattaagttattagaaacagttgggtttgaggtttctggtgcagagaatggcgctcaagcactctccctttgccaagaatggcttcctcacctaatttggatggatattccaatgcctgtgatggatggatatactgctactcaaaaaattcgcaccaccgacgcaggcaaagatgtggtaattattgctttgactgcttcggcttttcaagaagactatgctgctagtctacaagcaggttgtaacgactatattaccaaaccttttacagaaacggtgttgtttgacaagatggcacattacttaggagtgcgctatctttacgcccaagaaaccgcatctgatttaaacttgccaacctcacagacaaaatctctgactcctagtgacttgcgccttatgccaccaggatggattgctcaagtacatgaagctgctttggatctagatgatgccaaactctacaaacttatacagaaaatccccagccagaataaatcccttgctgatgcgctgaaatctttaattgataactttcatcacgaagcgatcaccaccttgacccagccttaatattcttatgcctagacccctcaaacctgcttcacaaaccaatatcctactcgtagacgatacccctgacaatctacggttgttatccaaaatcttagaagttcaaggttatattgtccgcaaatcactcaatggcaaaatggctttacaggcagcagtgcgagaacctcctgatttaattttgcttgatattaatatgcccgaaatgaacggttatgaactttgtcagcaattaaaactagaaaaaataactaagaatattcctattatttttattagcgctattgatgatattaaagataaaatcaaagcttttgaaattggtggtcaagactacatcactaaaccattccaagaattagaagttattgctcgaattagaaaccaattacttatccaagaacagcaatatcaattagaacaagaaatccaagaacgtcttcacgccgaaaaacaaattaagctacttaatcaagatttagaaaaacgggtacaactccgtactcaacaattgcagcagtctttagactttgaggcgaccctgaaacgaattactgataaagttcgagatacactcaatcaacatcaaattctgcaaagtgccgtacaagaattagctctagcactacaacttaaatgctgtgatgccgcaatttatacaaactatcacgaatcctcagttattcgctaccaatatgctgctttagaggaaaatcctaatcaggggcaattgtcacacacagccgatgcaccagagatttatcaccagttacaacaacaaaagtcatatttagctttctgccaaattgagcctctccctattcgtaacgaatcagccattttggcctgtcccatatttgatgaacaggtagaagaaatcggcattttaggcgatttatggttatttaaacctaccgaggaaactttctcccaaatggaaattaatttagtccaacaagtcgctaatcaatgtgcgatcgctctacgccaagctcgtctttatgaagcttctcaagcccaagttcaagaactccaccgacttaaccaactcaaagatgattttctcaacaccattactcatgagttgcgttctcctatcgctaatatgaaaatgatgattcagttattaacggcttttttccagcaaggcgagggattaattcaaggattacctcaatccttgttgcatgagcatcagattgttgaatatcttaatttattaaataaagattgcgaatacgagttaaaattaattgaagatattttacttttacaacatttagaagctggaacatatcctcagcaattaataaaaattaatctgcaagatttgattggacatattatcgagccattagctatcaaaattaaaaatcaacagcaaacttttagtgtgaatattttagctgacttaccaaccattgaaattgattctttcagccttgggcgaattattacagaactaatcaataatgcttacaaatatactccacctggagaaaatatttctttgtctgctactgttgtcgatgacaatactgtactttctgataatgtttttattctttcccgtcgtcatatttcatttatagagttaattgttacaaatacaggaataactattccccctgaagaacgttctcgtatttttgataaattttatcgtattaatggttctcatcctggtaaaaatggtagtactggtctaggtctggcattggtgaaaaaattagttgaaaatctaaatggacatatttttgttgaaagtttaaataacattactcaattcactgtacgatttcctctcattaattgagacaaaatttaagaatacatttatctataataaatttctacaactttaattccagcctaaaattcccgaacaatatcttgcctaattccttaaaatcggagccaaacaactgagatacactaattttcgccttctcacacacaggaataatcaacttcaccaaatgataaggctgactttgatttgtttttgaagcaatcctcaacgattccatgattccccctaaatctcccaataactgcaaatccttgccaattgcttgttcaaacaccaacaaaattaattgtaattttcgtgttaactcaatcgggatgggtttatatcctaattcgggagtaagtgcaattaattcgctaattccttgaatattaactcgatatttctctatttcctcttcgcctttaatttcctgtcctaaccacccgtaacaatgagaacaaaatcccgcaggtgaaaacctcgccatcataggtaaacgcgaaccacagtgaggacattcttctattaatcgctgtttgtgaatcaaacaaaattctatatctttaaatgaccatagtaatggttcatagatagttttgttctcctgcttccacccttcccaacaacaaggacaccaagcgcgatagttccgaaataaccccttgtcataaatcattcctttccagcttaaaagggtcaaaaagcgtaaatcctgacacattgttaactcttctaagacagtgactaactttcctgtcatttcacgcattccgttgatagccggtttagcatccctatttcccaataagtgactcaaattttttgccaatagctcagatttctcctcatctttaaggataagtggcgcaatttctcccataacgagcttttgagtggttaaacaatgcgcctgcgccaaacgatgaagatagctactaagactttctgcgtaggaagttcccaccgccacaggttcaagagagaataaccgacttcgttgcgggatttctagaggtattatgctccaatgttccaagtaaatagtcatttctcttggattaacttaagctgccactaacttgacaatattttttaacgaagagttacgctctccgttttcgatacctcagatttagttgggatgtaactacactcatcattcaaaataattacacagaaatgcctataaagcttggatgcaaaaagctcttgatttggctgtccaggcgatcgtagtcataattttattgttattattcatatatacaagtaataacgatttcttttaatcaagctaaacctgttatgtgtctgacgtgtcttttggaattttaggcgcagaatttacaatttcgtctatccatcgcctgagagaatcattttcatctctcaggctgcgaattttcccaagatttcattttgaattactgcgacttggtgctttagattctctaagtctgtgtgcatggtagttaaatctggtgcttccgggcgttcttctgctagataggaacgaatccatcccataattagttccgaagctgttttcccttcagactgaactttattcataaaagcttcctttgtctcatcgtccattctgacgatgatttgattgttcagctttgtcatctgacgctttgccatgttaattatcgcttcaaaccctaaatctgtaataactctatttacctccattttgtatagttttggaaattttgtagtaactctcttgatttagtaataacaagtaactacaatagagtaacaagacaaaggagatcgccctccgtccaaagattgcgatcgccttttgtaaaaccccatcagtgaggttattcacatgattacacaagaagtatttgacgaccaaactttgacgcaatcggagtttgaggcatacattgaccagctaactgacccagcaccaccagaaatagaaattgactcagtgacagatgattttggagaactttatcgagtttggaatggttcgcaactactaggtactttttatcaaaaccttgagaacaaatggatagcgcaaccttgtaatagagatgaaagaccttgttgcgatactgctttgcaagcacagttgatcatcatagctgttaatggtttgctagtagcagatgcagcgtaaaagctttgatagataaatttcctattacctagagacgtggtttattcccgtctctttatttattggcttcgcctggcaatgtgcttgccgttattatattttctttgcaaaagcaaatgctggtgagcaaacttgtttaagcaatatcatcctctacattactttttatagaattattgactgcattacgcgctaaaactatccctaaatgaactgattctctattaatataaaaatcatgattacctgtaatgatataattttcctttgttcttgtactttcttccagaacatattttagaaaaattttcctaaattcattaattcttatatttttttcagttatttcataaatagaattttgaatcagactattaaaaggtgtaggatggataaatcttttaccattcctttgtgtaaatagataattatgtgtaggtcggaatatctgccttagtccagcaatctcatctaacaaatgtggcttgctttgataagtatatatttttaaccactcttcgagatattgataaaagctacgtccatcagcataaagtatatttggtatttttaacttgatttcattatatttttttgttgttttatagctatcagataaccaatgaattatccaatcttcattttcttgatagacgtatccactaactacttcatttgatttttcagagacaatagcttcataactatcaacaaactttagatttctatataattgctgtcgctgcggaggaagatatgtcatgaatgctattattatgaaaatttgatatatttctgcgatttctattagatgtgatttattgataatttggtattttaatctacattgctttctaagattctccactacaactaaaatctcagaccaagttagtattaaatccctgttcaaaactatatgacgatgttctttaaccttcttttgggcaatagccattgcctttcttaattcttgaataactggtaaatcatcatactgttctctagcatgaaaacccattttttggtagtacaggaattttgctaacactaaaagagttctaaaaactgcaaattccgtataggggctgtcaacacctctacctctcttatctattatttcgttttgaggatctgcttttaaccaagctagatagcgttctgcaacttgcaaagttttttgacttgctgccgggtcgctgactggaactattaattctaaatccaatttttcaataggtactttttcgatacggtaaaaccagcccaatataagacgagtctgtttcaagtattgttgggctgtagttggcgaaataatttttctattctgctgctgattctgctcagtaaaaaatttttgtaaagcaaccatcacctcttggatatgttctactaatgtatactcttttcgtgtacctaaagcataatgttgtttaggaattggttgttcagcatcattttgattatcgctggttatttctttagaatcttgtgcataagaaattttccgctttctagcattactgatgggggatgccgtactaaagttttctatccaccaaggctgctgctcgcaccacttcagaaattggttaagtgctgcgcggtaagtgtactgacttttttctgatatcagtagctcatcaaaaactttttgttgaatatcaatcgcttcaaatagtagctccaaagacaagcttttcatgaaatctagagctttttcaatttcactattggtgattcggggttgtagaggcgcaggaaatccccatccaggcagagtaaaacgtaccaaggcagtttgtgtacgagacaaagtagctttggctttttcctgaagctgttgtgtttgaatgtgctgttgataaagattccaaatatcaaacagtgaaagaagattgtccaccagggcaatgagctgattagccttattgtcaaaattttgagaacaataccatcttaaaactcacttcaaatattagaaatgtaaatttttgttgacaaaaacctctgctgtgaatttgattcagttttatattgtatttttatgtacataaatatcatgtcgtcagccaggagaatctccaaaacaagcaaacttgccttatcagcacgacttcacatttcaattgattaactcaaatgcttagtgatattgaatttgagcattggtgtcgccgcctcaatctttctgaacaagctcggaaggtaatagaacaaatccgtacctctgagccatcacggcgtgttggtggtggtaaaaagaacgtttcaggccgttacccaagttccaaaatgggagtaagtatccagtttgaatcacaccggaatgaattagcccatatttataaactggaaactgatgatgatgtattggagtactacgaccaacctcctccgatttttctggattacttgagtaaaaatggcaggcgcaattaccacagccatacacctgacttttttgtgatccgaaaaagtgcagcaggttgggaagaatgcagtgtagagcaaaatttacttaaaaaagtacaagatagtccaaaccgttggcagaggcaagaagacggaacatggatttgtccaccggggaaagaatatgctgctcaatttggtctttattatgttgtccgttcctctgcggaaattaattcaatatttttgcgtaacttcgtttggttggaagattatttaaataaccagcaattaacagttgatgatgaaatcactgatgctgtatgcaatcttgtcaaattacagccaggaatctctttagccaacataatttatcaaattaaggaagccagcattgatgacttaaatactttgatagcgacaaaccaagtatatgttgacctcaacacttatcttttagctcaaccagaaaaagtaaaagtctttctagacgaagaagaagcatttacttttaaccaaataactaaggtttctgaaccacaagctattaacaaattgggcatttttaaagcctctgttggcacatctatattttgggatggtagtaagtgggaaattgcaaacacaggcgaaaaatcaattgcacttatcacacaagatggaaaatttattgatttacctaatcatgtttttgaaactttagttagagataagaaaataacaagcctacaaacaccagaagaaccaacgattaattctgaagttgaagaattacttaggaaggcaagtacagaagatagaaaagaagctacctctcgctacaaggcaatagaagcattcctaaatggaaattcctctaataaacctaatcgctctcaaagacgttggattgctagttaccgaaaggcagaaaaaacctatggtagaggcttcattggacttttacctaaacatagagataaaggttggcgtagacaaggtatcccagaggaagtgttgttattcatgcaacaacacatagaaataaactacgaaaacattaaacaacactctatccgtcatgcttatcagtcttttaaagatttatgcaacgaaaaaggatacaagcctcctagttcggaatcataccgtcaagcagtaagaaaccgccctcaatataagcaaattcaaaagcgaatgggcgaccgtgctgcttataaagaagagcctttttactggtatatacatcgagaggaaacgcctcctcacggcgatcgcccatttgaaatttgtcatatcgaccatacggaggtagatgttgaactgctcagtgcaatcatgctaaagctgggcatggatattagcgtcatcaaagaaaaagccagtatggggagaccttggttgaccttaatgcttgacgcttactcacgaagaataattgctgcatatatgacgttcgattccccaagttatcgttccaacatgatgattttgaagatgtgtgttcagagatatggacgactaccccaaattatagttgtggatggaggggctgattttgggggtacttattttgaaacacttcttgcttacttccgtgtcaccaaaaaagagcgacctgcagctaaagcaaggcatgggtcagttattgaatcttatttcggtgtagctgataaggaattttggcataacttgatgggaaatacccaaattacaaaaaatgttcggcaagtaactaaaagcgtaaatccaaaaaacaatgctgtatggacacttgccaagctgtactcctatttttgtgaatactgctatgaaatctatgacacttgcccacaccctgctttaagaatgagtcctcgtgaggctttcaatatcggtacagcaagaagtggtagtcgagaacataccttcattaatgaagaagaattcaaatttttagctctaccatcaccaaccgactctgccggaaccagaaagataactcaagaaggtgtaaaaatcaattatctatactattggcactcttgttttagccgttttcgcaatattaaagtagaagtcaaatacgacccatttgatattacgcaagcttacgcttatatcaacggcgaatgggttaaatgccactctctttatctgcgagaacttgaaggtcactcagaacgagaactgatgattgcagcagctgaattaaagaagctcaatcgaattcaaaataagcagtttagtgatatcacaggcaaaaaactagctgagttttttaggcggatagaaatggaggaagctgctcttgctccaccttggctggaagcgaaaaaggcagtattacaacaacgtttgagagatagtgaactaaaacaagtccacgctcagatagaaggaaaaatagatgagtctgaaactatcacatctaccaatgtagaaaattctgcatttattaaagcagaacatttaacaaagcagtttacagaatcatctcaacaagagcttgatgatgaaaacttggtcgaatcttttgaacctttagaggagtggtaatgtctggacaatatagatttccgcttgaactacttgagcaaccaccacaaaaaagattgcaattctttaaaaatcctggtgtcacaattatgcaccacaaccttaagaatgctttttacaaattacaccgtattattcgggaaccagcaggaagctcaataattttagtgatcgggccttctggtgttgggaaatcgactttactgcaattactaaaaaacaaaatcattgaggagagcttaggccaaatggaagcagaccctggttggattcctatcgtctgtgttgaggctcctgcaccagcaaaaggtactttcagatggaaaattttctacaggaaaattttagaggctgttgatgaacctggtattgaccaaaaaattaactacaactcagacggcatacgtcgagacagtgatggaaagttggcttttggagccaaagctacagaagattcactacgcctagcaatggagaaggccttaattcaccgcagaccttacactctgagcgtggacgagtttcagcatattggcaaaatggctagtgaacaattgttgcaagctcacatggactgtgtgaaatcggcagtgaatactaccaaaatcccttggactggttttggtacttatcaactacttaattttctagaacttagcccccaactaagccgacgtaccaaaatcatgcacattccacgttatctactagaaaaagacgaagacatacaagagtttaagagagtgttagagcatcttcaataccggatgccactacaagaaacacctcctttaaaggagaaatattgggaattttgttacgaacgcagcattggcaatattggtactctgaagaattggcttacagatgcctatgaccttgctgtatttgaagacgcaaatactttaactttggaacatcttcaagaaacagctaaatcttcttctgagtgtgaacagatggctttggaagcaatagagggagaagaaaagctgacggatagtcaagataaaagtaaaagtctgcgtactattctcggattagccaaggatgaaacccaaaatagtaataaatcttcaactcatgtccaagaacacaaccaaaagagccaaaaatctagtaataaaacaaaagcattcaaacgtaatcctagccgagatccagtaagaggtgaaccagtatgagttctaaagagtttgattttatagagttgtgtgatttgtaattacttggtattccaaagtgtcgagaacagaaaatattggcagcattattatgaagcaaggctacaagttgggttagaaagttaattttttagagatttttttaactaaaaaggatgttttattttgatgaatatcaatattagtagtgaactacgggagcttagaaaatctcaattaccaactcgtagccgtttatatcatctaaaacctataggggtaggaacatcaactgtagagagtctgacaagttatataactcgactagctgtgtctcattgtctacctacaggtgtattgatggtaacagaaatcgcaccagtcatcaataaaacttatggggctggaaccctacac

SEQ ID NO: 888 - DNA, 31443 bp, Stanieria sp.
  source 1..31443: mol_type = other DNA
tggtcggcaattttgttgggcggacggacattctttttcttatttactcgcaagcttgattgtcactggaagcataacttttcggcaattataaccataatatttccgccatccaatcaaatattgctattttgacgttaattattttgtaaaattttgaccttgtagaagcataacatttctgcaagtcaaaaatagaaacataagctttccgcaggtctatctctcaagatcgagcttctaaattggtttttgttttaggataatatatttttgcagtaacttttttcatctcatcaattcataaacgtagaatcatctcaagagaaatataaatataaccgaccaataatggctgaagaaggaaaattaaatcgatacaaacaccttatattttctaatcccattgattttcccgagacaagttgtttatactcactcgaatcaattgcagttggaacgccttataccgaaagtctcagcagttatttaaatagattagctcaagagcattgtgttactcctcaaaagctaatcatgggagaaattgcgcctacgatcttaggtgataaatacgctccagaaatattctccaaaaatgtcagttctctttttggcaacagtgatgccaaaccagctatcaatgggatgagagagatgacacgatcgctcgttgatgccttagaaaagctaactctacgtcaggatttgcggtttttatcttgtgtaacttggaaagggataattagcgatcgcggtttgtttcgtcagtataaagcttggtgtcctctctgttttgaaacttggcgacaagcaagaaagttaatctatgagcctttactctggtcatttcgggaggttgatttttgtcccgaacatcaatgtgaattatgcgatcgctgccctcactgtgattctttccaaaaagcgatctctgacttctccgtacctggatattgcagtagatgcagacactggctaggaaaaagtgataatactaaatcatcattacaggaagattttaaacaaaaccattttatacttcaaggtattggagatttgattgccttgacccctcaattaaagcatcaacctaatctcaagagtttaaagcataagtttaagctaatcttattttgttttgagcgagctattcatcacgatttaggtcaatatgttgtattaattaaactaattgaaaagctgaaaatagatttaaagcaaaattactttaaaccaataaatttaaccgaaataatcattcccgtctgtcaacaagccaaaatatcagtatcgcaactgtttgaaaataattatgagaatttggctcagatattagcccaaaatattgaaactgattataaaattttataggctagattgtctaaattataaattcactacacaaatttttaggatagatagttaaaaagtactaagttttaattcatttgtctgcgagttgttgattctgttaactaataaatttgtattgaccgagacatcataaaataaggtgattgctatcaagttggaaaaatggcgatcgctcaagtaggtagagaagaacagcatgaagaaatcgaactcatccaaaatccctacatagaattagcttttcctgtaatgggaacaagcttgcccatcgatcacggctatcagctatactcggcattgaaataccgattgatgcaacttaaagattgggatgacatcagcataaaaacaatttcaggaaaatgcgatcgccacaaaagaaacgaaataaacttaactaaccgttcaaaactactagttcgtcttccctcggaaaaagtaccttttgtctattcctttagtggtaaatctttaactatcggcaaccacaaaattaggttgggaattccaaacatgaattttctgcaaccaaagtcgaaaatgcgatcgcatattgttgttatcagaggatatgaagaaccgaagacatttttagaagcagccaaaagacaattagatgcactaaatattcaggcagacattaaactaatctccaaccaagatggcactcccaagcgcaaaaccatcgcagtcaaacaaactttagtcggttttgggattgaagcaaatcatttaagcgaagcagattctataacccttcaagaaaaaggattgggaggaaaacacaaaatgggctgtggcgtgtttgtttaaattattgggacatgattgttaaagcagatgaaccgaaaatagagataagtttaagcgatcctggtatgaccatgctacatcgtgctggagttgcaggactttacatgagtttaaaagctttagccaaacgttatcctaccctgaagtctcggcaaggtaatttccaatggactttaacgaaaaatagcattagcctcaactggaagggaaacgattacgaagcattagactggctatttagtgaatcatttcaaattagtagcgatggtttaatttctctgacaggcttacaatctcccaattgggaaactcaattagctattcatgttgggattaaaaatacttttttgcaacacaatcaattctttagatcggcagaagatgctattgaatctttaaccatcgataatctggaagttcagattgagtacaaaaaagttaagtcttacgcacatcaatactatgccgaacaactatgtccgatagaacgacttaatttcaaacgtatctttactaaattaagactttttatttttattcattacactctaattggatttttatttctgtatgaaattagacaaggaggtaatttagagcaaaatgtagtaggaataacgggttggctgtatcccggtgcaacagtcaagcactatgcctaccaaaaagaaacccaattcaccgaaactctagaaagagcgatcgctctactatacgctcctgttgcttgtctctacttcattgcgcctaaatcttatctttacgacaccaaaactcaatattgcctagttattcccgaaataactgatttaaaatcctacccacgacaacgacaaaagctgaataattggaattatcaacaatttctagcctctggatacagtgatgctggttttcgcctccttacccaacaagctactctacgcattcttcaacaaaacaacctgaaacgctgccaaataattacctttggtcaaactcaatggacgagatttcagaaaattcgtaaaaacgttgaagtaatcgaactaaccgacaagataatcaaaaactatcgattatgcgatcgctattttaagaaccgagtagtcgaatgggaagacggtaacttcatcgctgcaagcattgtccgagaactgatcgccgaaaacttagccagaggattttcttggtggcataactttactcatactgtcagaagtaacaagctatttagattaattagctacgaaaagaaaggattacaacaaatggtcaaaaataccgattgggatgaagaggctcaaaaactattcgttcaagcctgtcataaagcacttcatcaaatacgtggcaaacttgctagtaaagctaaagaagacgagtatgttcaatttgagcgagaaaacgagcgcatccgttctagtttgatccgttgtcaaaattcagaagatttacgtcattttctggctacattctggagcaaagcaggaataatttccctcctttcacaacattggcaacaattgatgcctttaactactaaaccaagcaactggaaacttgccagggatttagcattattggctttagctagctacacaacaccagagggatacaaacaaacatctcaagaagagaaaccaaaagacgtagaagatagaaaaccagatcaagaggaaacatcctcttctactgtaaaaacccaagaattatctgaggaggagtaaaacatgaccttctatttgtatggaaatatccttactttctatggagtagcagccaataatcgtggtgaaaatcaaggcaatataagtactctacaaaaattactttggaaaggagaaacacataccaaaatctcagcagaagcaatacgttgggcaattagatattactggcaaaaagcaggttatcaggtcaatcgagtttgggatgacgaagttaacgactatacttggcaagaccctaaattcaatcccttagattttatcgatgacgatttgttagggttttttgaagctgaaagtgccaaaaaagagccagagaatgctcctaataaatcacagtcagaaaacgttaataacgaaccacagccagagaatgccaagctagagaacaccaatcagtcaaaatccaagaagaaactaccgaaaaaactcaaaccaaaaggctcagtaacccatagaaaaggcagattagatgtaactcgtgctatctcgcttctaccctatgacggtaacgtgacctttaatgctaaaagtgggacaaaaactcgaacatcaatctatggaacagaatttcacgcaacccgctatcaatttggtttaggtattactccagagtcttgtcaggataaatctagagttttggctttattagatgcgctagtttctatttgtcgggtaggtggtaatcatggtaggtttctttttgattttgccccagaaagtattgttttgcgttggacatctgattttacccctcgctttctttattgctttgaagaagacgaaatggataatatttgcactcctgaattattaaggcaaataagaagtggcgatctcgagcctacagaattttggatctcaggtaaaatagccgaaaatttacagggttctgaatattcaaaagttaatcaattttcaggaattaaagctatggtagatgcgttgaaacagaaaattgcttgcgatctgcaattttgtcttctcgatcaaaccaatagaggagaaaattagatgatgatcgcccttcgagttgatgttcccatcgcttcgtttcctacttcccgcagtcgagaataccgcgaaacttatcccgttcctcctccttcaactgtttatggaatgctcttgtctttagtaggggaaacagatcgatacaaacactgtggagtcaaaattgcgctcgctcttttatccgaacctgctaaatcaataactttaagaaaaactcgaagatttaaatctcaaaaaattgaccacaaagaaaatactagacccgatttccaagaaatacttacaggaatcgaatttattgtttggattgatactggagacgatctagctcaacctgatttgtgcgatcgcataacgggagcatttgccaatccaggatcggttcaacgatttggtttgttatgtttgggagaaagtagagatttagttaattccatcgatttattagctacaacagatttcgagcaacctctacaatatttgattcaagatgattacggttatttatctctaccttattgggtcgatcgtgtcggttcgagcaagactcgttggttaaactactcccttgaagctttagaagttcagcaacctcctcattctgcatggacaaagattcaagctccgtaaatcaaataatttttgcaaggatatacaattgttaatttatattggggagtcacattggcttaaagccttggtatttatgcagttaagttttttttagagcgattgagatgcttgaaaaatgctgcgacctctgagatgattgagtcgtgcagtgtactgttgactaattttaaaaagattgttttgtattattttgattacaagtacaattcatgattttttacttcagagttatttcacagtcaacaatttagaggttgcagggcaaccagattagatgtcgtcaggcgttgtgaacaagagttttaagtatgaattgaaagtgacaggactcgacgggcaaccagattagatgtcgtcaggcgttgtgaacatcaacgagattatccgcagttattgtatccgcaagggcaacaagattagatgtcgtcaggcgttgtgaacggaaattgccccaggggtggcttatcccaagtttgctgtaaccagattagatgtcgtcaggcattgtgaaactaatctaactaaattgtttttatcttattaattgtttacacaataaatattaaaaattgattccctgtaaggcgaattatacttaagtaatttaacctaatatgtaatttaaacaacttttttttggcaattttttgtaaaattctcttaaacaaataaagtgttctcaaattagtttgatgcggttttatcaagttaagtaatactaacgttacgttacttatctattagtagttaaagtcggaattaatcattaatttagatttgcctttatggttaactccactgtacttgcgccaggggcaagagttgttgttcgagatgcggaatggctagttcgtaaaactctcaaagcttcggcgggaagtagagtagtaatagaacttgttggtgttagtgattttattaaacatgaaacggcacaatttattgccgaattagaagaagatttagttgttttagacccaaaggaaactaaattaaccgtagatgattcttctggttatttaaagtctttattatttatcgaagctaatctaaaacaaactgcgcctactgactcaaatctctacattgggcataaggcagcgatggatgttttaccttttcaattagacccaagcttgaaagctttagaaatgtctcgtcaaagattattaattgccgatgcggtaggtttgggaaaaactctggaagcgggaattttagtatcggaaatgattcgacggggtaaaggcagacgtattttagtcgtgacgactaaaagtatgttaacccagtttcagaaggaattttggtcgcgttttactattccgttagtacgtttggattcagtaggaattcaaaggattagatcgcgtattccgactaatcataatccctttcactattacgatagagcgattgtttctgtagatactctcaagcaagatcgctcgtatcgtacctacattgaaaatgcttactgggacatcattgtcattgatgaagctcataatgtagcacgtcggggaaggggacaaagtacctctttaagagcaaaattagcgcaaagattggctactcgttctgatagtttaatcatgctgtcggctacgcctcatgatggacgagcagagagttttgcttctttgatgaatatgctcgatccgacagcgatcgcatctgagtcagactacagcaaagacgaaattcgcgatctctacgtccgtcgtttcaaaaaggatgtcaaagaccaattagccaagaactttcccgaacgaaacgcgatcgcaattgaaagtaatgcctctagtttggaagaatcagcttttgagatactcgatggtttaaaactttcttctatcgataccaaagctaaagctggaatgttgtttaagacaactttgcttaaagcgatgttatctagtccgatggcttgtctggagactgtagttaaacgcattagaaaactagaaaaagaggaaagacgggggaacgaaatagatattgaagaattgaagtgtttgcaggaggtattagagaaaattaccgcttctaaattttctaaatatcgacaactgctgtctgtaattggggaaaaagataacaacgggtttgggtggaaagggacgaattctaaagaccgtattgtaatctttaccgagcgtttggaaacaatgcgctttctcaaagagaatttaagtaaggatttatcactaaaagaaaatgcgatcgccacattagatggaagtatgtccgatgtcgatctgatggagattattgaagagtttggtaatgaacagtctcctcttaggttattaattgctacggatgtagcttcggaagggattaacctccattatttatctcatcgtcttattcatttcgacattccctggtcgttaatggctttacagcagcgcaatggcaggatcgatcgctacggacaagaagaacaaccacaaattcgttatttgctaactcgttctaataattctcgtatggatgaggtagagagaattattcgggttttattggataaggatgaacaagcagttaaaaatatcggcgatccttctgtatttatgggtgtgttcgatgttgatgaggaaataaaaattacttcggaagctattgagtcgggaagatcggcagaagattttgctagttccctcgaaccaaaacaacctgaagatgacgagtttgacttctttgctttattcgatgagccagaaataagccaagcagtaaatattgaaaataatctcgccgaaatgccgagcttatttgaggatgattttagctatgtaaagtctgcactagagcaactaagacaagagcaaaatttacagctaaatattattgaagaggaactgtcgatcgagttaaccatgcctcaagagttacggcaacgctacgatcgcttcccgaaagagattttacctgacaagaacgaaccattgaggttatcggcggataaaatagcgatcgctcgtgctttagatgaagctagacgtgctgaagatagttggtcttcgctgcaatatctctgggaattacaccccatagttacttggcttaatgacaggggagtaactttattcggtcgtcaccaagctccagtaatcactttagcggataaattagcacccaaagaagttgtctttatcatctctggggtaattcccaaccgcaggggacaaccgttgattaataagtggttgggagtagtttttgaagggaaaaaatttgtcagagttgaagaatttactactacacgcgatcgcactaacttagggaaagaacccatacccaataccaatcaaccgatagacgagtctttattagaattgcgatctcaagctgtggatgaggcgactaaagtaattcttgcagcaaatcgagaatataaccagagcatcgacccgatattacagcagcagttagatcgtttagagcaattgaagtgggaacataatcgacaactcgaactaaagtttgagaatactaacagcctaactaagagcaaaaaagaaaaagcccaacagcgtatcgagcgcattttcgatgactattacaactgggtacaggaaagcaccattacagaagaagttccttatagaacccatttgagatctcacgaagagactgaaagccgcttaagcattaatctgacgaagcagagatcgatcttggcagtcgcatgagataaagttcgctcaacagcgcgattctacaagcggaggaaacctccgcgtatctcgcgctcaaagtttttaaccaaacttttacaacgctccatccaagcgtttgagcgttcaatcacccagcgagcaacagcaggaacaaatccagatttcccttgcgctgccttctcttgtttcgagggtttggtggacagttcaaacttgattttcgtcatgatctcgggataaacttgctccaattgctcagtcaaatgttcgggatgatatccgtggtctagcaaaatagtgagcttcggaaggttaacgggttttgactggaaatagtcaatatttagcgtcagcatctcaatcaatcctgcatcatccgagacatttgctggtgtgcagtgggtaaagaaaggaaatcccagtgtatcaattgccagatgtcttttaatcccattcgtggctttgtaaaaacaaaagcctttggaagcgacactggcattacaggtatttttcacggcttgagagtcaatgattattaatgttgtccacttaggttttttttaacctgctgacgtacttgttcatgtaaggcattcatgagcttttcaaacacccctacctttcgccactgcttgtagtgccaatagacagttgagtagggaggtaaatctttgggcaagtctgcccaattacaaccatttttgagttgatagagtattccgtcaaggatttctcgccttgtccaattggcaggtcgggtttgcttcttagtcggcaatatcttaactaacaggggttctagaatttcccattcttcatcgctaaggctactggaatacttcatggtcaatgaattttgatactttcgagaactttaagtccatacttggaagatgtcaaatgggttctatatcaaaatagtcgcagttttaagcagtagtggatgattaataactccaacttattacttattaactattacttattacttaaaaaagatggctattttaactggaataaacaacgaaaacgaattttattcgcatcactatttagatgctattttgcagcaagatatcaaagatgttgtcaaacgctggaaggaacgagaagaagaaacgggagataaatctccaccaaaagcgatcgcatctttgaagactgattactttaaaacttgcagtcagatcggtcaagaaaaagacattcaagagcgattattgcttcaaagggaatggtttagtagatttttctcagtattgggttatgagtttaaaccgactgagaaaattttggatgatgacgaaataattccgatagttgccgaagttaataagaataacggacagcctttactgtggattattgaagctgtttccgatacagaagaagcagttgatgttctttctctaagcttgaatcaggttcaatttggtaatgatgagcgatcgcctcagccgaatccagaactactcaacatcgactttgaagacttaatctctgactatatctttgctcaaaacgatcctcctcgttgggttattttggctggtattcatcagatagttttgttagaccgctttaagtggaatgcttcgcggttattgcgttttgacttaggagaaattctctctcgtctggataatgatgctctgcaagctaaggcgattttactccatcgcgaacatacctgtcctaatgagggaacggctttactcgatgagttagatgaaaattctcacaaacacgctttttctgtctccgacgatctcaaatatgctttgcgggagtctatcgagttattagggaacgaagcggtttggtacaagcaaaacaagcttcacgaaggggtatatagaggaaaactggatgaaggacagttaaccctagaatgcttgcggtatatgtatcgcttattgtttttgttttatattgaggcgcgacaggaattgggttatgcgccgatgaattcggatatttaccgccaagggtacagtttggactttttgcggaatttagagaatgtcgatctacgcactactgaagatacagaaggttattttatcgatgcttcgattaaaaagctgtttaagttggtttgggaagggtatcccgaacaggattatgaacaattgagtttcgatttaaaacaacaagaaattacccacgatacgtttgaactaaagcccctaaaaagtcatctcttcgatcctgcgcgtttatctttactcaataaagtcaagtttcgtaatgtagttttgcgtcgggtaattgaattaatgtctctttcgagggcgagtagcggtaagagaagaggacgtatttcctatgctcaattaggtattaaccaattaggcgcggtttacgaagctttactgtgttttcggggcttttttgccgaagaagatttatatgaagtcaagaaagccgatgataaaaacactgatgaactaaaggtagcttattttgttaagttaccagatttagaaaactataccgataaagaacgagttttcaatgatgatggtacgcctaaatgctaccccaaaggtacttttatctatcgtttagcaggaagagatagacaaaattccgcttcttactatactcccgaatctctaactcgttgtttggtcaaatattccctcaaagagttactcaaagataaaactgctgaggatattctcaagctacgtatctgcgaaccagctatgggaagcgcagcgtttttgaatgaggcgattaatcaattagccgaggcttatttagaactcaaacaaaaagaattagatcggcgcattaaacaagaagattatctgcaagaaaaacagaaagtcaaaatgttgctggcagatcgcaatgtatttgggattgacttaaatcccgtagcagttgagttagccgaagtatccttatggcttaattccatttatcaaggagcgcacgtaccttggtttggaatgcaattacactgcgggaattctttaattggggcgcgtcgtcaagtttacgataccagtttaattcctcaaagtaacaggcacaaaaactattggtatgacaacgagccacagcgagttttattaacagaagaacttccagcaaaatctatctttcatttcctattacccgatcctgggatggctaactataccgacaaggtaattaaacaattagcaccagaaaacatcaaaaaaattaaagattggcagaaagaattgtgtaaagaagcttacgaaggatttgaaatcgaacagttagttagcttaagcaaaaaaattgacgaactttggcaacgtcatgtcaaagaacagcgtaatatgcgaaatcgcaccaccgatcctttggctgtttttggacaagaagaggataagttacagcgcagcaccttgaccatgaaagacaaaatcgtggctcaagaaagaatgtccgaaggtgtgggtaattccagtgcttatcggcgattaaaactggtaatggattattggtgtgctttatggttttggcgcgtcgaaaaagcggatttattacctactcgtagtgagtatttaatggagcttttcgtcattttaggcgaaagacccatcgtcccagaaaaacagttagatattcctttatttcctgaaactttaccagaagcagaagcaaaagaatttatcgatcaatatggttcggttgacttaaaaacactctgtagccgttatgagagattgcagttagtagaagaaatagccaaagaaaaaagattcttccactgggaattagaatttgccgatatttttgcggataataatggctttgattttatcttaggaaatccaccttggatcaaagtggagtggcaagaaggtgatgtattaggcgatgccgaacctttatttatactgcgtaaattttctgcgagtaagttaggaaaattaagagaagagactttaactaaatattttcagttacaagctgattattttaatgtttatgaaggttgtgaaggaacgcaaaattttctaaatgcttatcaaaattatcccttattaaaaggaacacaaactaacttattcaagtgttttcttcctcaaggttggtctaatagtaacgaaaatgccgttcaaagttttttgcatcccgaaggagtttacgacgatccaaaaggaggaattttaagaagccatatttatcaaagattgagaaatcattttcagtttcagaatcaatttatactttttcccataggggatagaaataaatacagtattaatatttttgggcgacgacaagaacaagctgattttataaatatttctaatctttttgctgcaaaaacaattgatgcttgttacgaacataatggaacaggaaaagttggtggaattaaaaatgatgacaatgagtggaatctagaaggtcatcaaaaaagaattatcagggttaatgaagatcaactagctttttttgcaaagctttatgacaaagaaaatacacctgctttgcaagctcgtcttccagcaattcattctcaacagttgattaaagtattagaaaaatttgccagacaatctctttatctaagtgattttcaaaaaaaatattttactacacagtgctggaatgaaactaatgctcaaaacgacggaacaactaagcgaaatacttgttttcctgaatcgacagatcaattaattctttcgggtcctcattttcatataggaaatccattaagtaaaacaccaagagaaatttgtgcagaaaaaggacactatgatgttttagatttaaataccattcccgatgactatctacctcgtactaattatgttcctgcttgtaatgttaatgagtatcaaaatcgaataccacgagttaattggattgaagaagaagaaagcgaaccaaaaaaagtaactgagtattatcgtttcttaaatagagaaatgctttctcaatcgggagaaagaaccttgatttcaactattctaactaaagataatacctatattcatacttgtttaggaacagcttttaaatcaaataaaattttacttagtttttatagtttggcattatctgttcctctcgattttagagttaaaactacaggaatgggtcatgcaaatatatcattgatagaacaattacctgttttatcttctgactctaaatacaaatacagcttacatttaagagcattatctttaacttgcttaacaagctactacgccgaactttgggaatcaatctatacccaagaattcaatcgagacacctggacaaaacaagaccccagattaaataaccaattcttccaaaacttaaccccaaactggcaaagaaacgtcgccctccgcaccgactacgatcgccgacaggcattagtagaaatagacgtactcgcagcaatggcactgggtttgaccctagacgaactgatcaccatctaccgagtgcaattccccgtgatgcgccaatacgaaaaagatacttggtacgaccaaaacgggcgcattgtcttcacttccagtaaaggacttccaggggtaggtttccctcgtactgcacccagaggagaaacgggttgggaagatatcaaagataggtcatcgggaacagtagaacgcactatcgaagataacactctaccaggaggtgctgttaccagaacaattgtgtatgaagccccattcgatctttgcgatcgcgaagaggattatcgtattgcctgggcagcttttgaacaaaggggtttgaagtaataagtaaatttgttgtgagtgattcaaatttatcaatacaagaaagagcagaaaattttgcaatcagagttattaaagcttatgtggaactcaataaaagaaaatacgatgatgcgggaaaagttctatcaaaacagtttttacactctggcacttctattggagcaaattgttctgaagctgtttatgcccaatcaagaaatgattttattcacaaatattcaatatctctcaaagaagcaaatgaaactaggtactggataaatctaatgattaaatcgcaaatcgtgactgaatccaaatttactcccatgcttcaagaactagaagaaataatcaaaatattgaccgcatcaattaaaaaactaaaagaaaactaaattaaaaacttattacttattacctattacttattactttattaaatgattccttcagtattagcaacagaaatccaagccagcattacagattttttaaagaccgaatttcgctcgtcttctcctggttttgaagatttaatcgatcgctttttagataatccagaagcaatttttaaaggaccatatttatctgccagtctgccttttagatcgggaacttcgggaatcgattattttcccgacgtaccgatggcttttcctccccatcgccatcaagaacaagcattcgggcgactgcaacaccctgattatcagtcaactatcgtcgctactggtacgggttcgggtaaaactgaatgttttatgatgccgatccttgaccactgttttaaatatcggggcgaaccaggtatcaaggcaatcttaatttatcccatgaatgccttggctaccgaccaagctaaaaggttagcacagttaatttggcacaattccaacctcaaaggttatattacggctggtttatttgtgggggaaagcgatcgcgaacccacttcggtaatgacagaaacgggagtaattaccagtaaagatattctgcgccaaagtcccccagatattttgttaaccaactacaaaatgttggactatctgctgattcgtcctaaagaccaagggttatgggttggtaatagtcccgaaactctacgctatttagttgtagatgaaattcatacttttgatggcgcacagggaacagatttagcctgtttgattcgtcgtctcaaggctcgtttgcaaacacccgcgaatcatttggcttgtgtgggaacttcggcaactttaggcggaaataaagacacggggaatgaattaataagctatgcaggaaagatatttaatgagacattcaataataacgctatcgttaccgaagataggttgagtgcagccgaatttttagccgatgcctttatcgatccgcaaccagtccccagtccagagttactagactctttactaccccaaaactatgacagtgtagaaaaatacatccgcgctcaatatcagttatggttcgatcgcgaacttaccgatgattggcaagaaatggagtggcgtattgaattaggcgatcgcttaaaatctctacccatagttaataacctactaaaaatcctttcaggcgaacctacttctttaccttctctttgggcgcagttgagtcgcaaaatgcgtcttcctgagagtaagggcgattcgccaatcgcccctacaatatatcaaaccgctttacttacgagtttggcagctttattttccctggcacgaaatattaataaccgtccttgggcgaatatccgcattcaactctggctgagggaattacggcgtatggtagctaatatcagcgatcgccccgaactaacttttgctgacgatctaaccaatgaggaacaagggcgcaatttacctttagtccactgtcgcgaatgcggtgctactggttggggtggattgcgtcgcaaacaaagcgatcgccaaattggctgtaacttaaaagatttttaccaggctttttttagtaaaagtcctctgatttcttttatttttcctgctaaagaagatatggaaagacggcgacaggaacaaggagaaagaaagaaattatgttctaattgcctcagtttaaatatttctagtgccacctactgtcatacctgtggtagccagcagttattatccgtaaccgaacccaacctcattcgagaagttaaccgtaacggttcgagatggcgcgaatccagtcatgattgtcctatttgtggcgcaaaaaacaatttagccatcttgggttctcgcgctgctagtttagctagtgctgccattggcacactgtttgcttctagctacaacgacgatcgcaaattaattaccttttccgattcggtacaagatgcagcccatcgtgctggcttttttactgcccgtaccttccgtactactttacgtactgccctgaaacagtatttagaccgtcagggtaacggcaagaatttagagcaaattattcccgattttaaaacttattggcgacaagaattaggttcggataccgattatgtcgctacctttattccctcggatttagagtggttgggggaatgggaagaactaaaacaaaaaggaacttgttctgccaatctcaaagaattatgcgatcgccgtttggattgggaaattatttccgaattaagtctcaaaacttcctttggcggttctttagaaaaaacgggtacttgtgcaataggaattaatctcgaacaattagatcgagctacagcagaagtattaattaaactcaaaaatgaactaggactgcatcatcttggaaatgaaaagataaaacaatttatcttaggcatcatttatcacatcaggcaaaaaggcggaatcttacatcgcctcttagatatctcaattcagcaagatggaaaattttaccttctgcaaaatcagattttcatgcctggtataggaccagcttcgataaaacctgtttatcccatagaagcgagaagccatgaacagtttgaaccagttatacaaaaaattactccttggtgggaaaattgggcatttaaaaacttcttcgatcctcaagaagctactttaattggcgaacaaataccagtaatctatcaacatacttttaatactctagttgaattgggaattttaggcgatcgctatactaataaaaacgccaaagtttggggaattaatttagcagccttgcaactggatacccaaacgattcatctctcttgttctcattgccgtcatagtatcgtcagttcgcctacagaattagcttactggcaagaaatgtcctgtctgcaatcccaatgtcagggacggtatcaaatagacaataatcgacaactaaatttctataaaaatctctactccaaaggcaatgtctggcatatcttcgctcaagaacatacgggacttttagaaagagaagtaagagaagaactagaacgtcgctttattaacagtcaaaatcgttccgaccccaatttactctctgccacctctaccctagaaatggggattgatattggggatttatcttctgtcttactctgttctgttcctccccaacaagctaactaccaacagagaatcggacgggcgggaagacgagatggcaatgcctttgttactactattgccaacggtaccaatcacgacctctacttttggtctgaccccctcaaaatgattgcgggaggagtagaaaccccaggttgttatttagatgcttcggcaattctccagcgtcaattaactgcttattgtttggattgttggattgcacgggaaggaaatactttagacttaccagaaattttcaatcgggttttagcatcagtacaacagggcgacctcaatcgatttccctacacttggttgagttttatcgatcgcgaaagagaacaactattaaatggttttgttcgactatttgcccaagaaattggcgatcgcactcaacagcaattagaaatgtttatctcccaaggagaacgagatgaaggggggttacgctggcgcattctcaaccgacttcaagaagtagtagaagaaagaaaaagactgcaaaatcaaattagaacgctcgctcgtcgcataaaagagaaagaaaatggtgctaaatcccaaaaccacgaagaagaactggaagagttaaaacgagaacgaaagggcttcatggatttggtgaagcgaatcaacaacaaaaataccctcaattttttcaccgacgaagggttacttcctaactatgcttttcctgaagctggggtaactctcaaatcaattatctggcgacgcagaaatactagtggaaatagttctacgggtaaatatgaaacctttacctttgaatacgaacgtccatccgcattagcaattggggaactcgttccttctggaaaattttacgccgaaggtcgtcgcgtcaacgtagatcaaatcgatctcaatctttcggaaatagaagaatggcgattttgtcgtaactgtagttacgccgttcccaatatttaccaagaagccaaacagcgaacctgtccccgttgtggtgatgtaatgtggtcggatgaagggcgcaaacgtaaaatggtacggctgcgtcaagtaatggcaactactaaagatcgcgatagtcgtattggtgacgacagagacgaacgaactccagctttttttaccagacaattactagcagatttcgaccccatcgttagggaacagtcttatttgatagacgaagaagaatttccctttggctttgaatttctctcgcgagttaccttccgcgaaatcaacttcggtcaaattaccagccaggcagaaaccgtagaaattgctggcgtagcccgtgccaggtctggttttagtgtctgtcgcagttgtggcaaagtccaaaatggaggcgatctcgaagagatccgcttcgcgggacgcccaaatcatactcttgcttgtattcataaaaatagcgacgatccgcgccattttatggatgttctctatctatttcggcaatttgaatcagaagcaattcggatgttgttaccagtcgatacgttgaactctcccatacaactgcattcatttattgctgctttacagttgggtttaaaacttcactttcaaggaggagtagatcacctgcggactcttattagtgaagaaccttctcccaacagttccctacgcagaccttttctgttcctttacgacaccgtaccaggaggtactggttatctcaaacaactactccgcaatcgggatgaattgatttctgtatttgaagaagctcttaccgttcttcgcagttgtagttgtgaagatggctgttatgactgcgtatttgcctatcgcaataactttgaacaagataaaaccagccgtcgtagtgcgatcgcaattctcaatgccattgttacccgtaaaaacaaaattactactttagagtcgggattatctactgttaaattaaatgccctattcgatagcgttctcgaacagcgttttatcgatgctttaagccgttatcgctatcaagaccgacctactattctccgtaaagaagtaattaatggtaaacctggttatttactttctattggcgaacaaaactggcagatcgaacctcaagtagaactagaccagaatcatggagtagctattcccagtcgcgccgattttgttttttatcctgttaaagaatcgcccaacatcaaacccatcgccatctttaccgatggttgggaataccacagcgatcgcttatcacaagattttcaacaaagaatggcgatcgctaaaagtagtaattttcacgtttggtcactcacttggtctgatgtcgagtctcagttcaattcccaagcaggggcttatgtcaatcttttaacccaagagcttagtgaaaaatttcgcagtaatcaaaataaactttatcaacaatccaactgcgaacagttacggcatttaaaagacaaagatagctttatttggctgatccattatctgagcaatcccgagcgtcaattatggcagcgatgggctttattaagaagttttgcttatattcaacaagagcaatatcaaaatcttagcgatcgccatctctgggaacaagaagtaattaacttaatagactcaaaaataattaatagcttcggtctcgatctttctgattatttagctaatttgagttggaattcagcacaatctaatactttgattaaatcttatatagcgattaatccgaagaagtttaattctaaagacggtaagagttctttaatggtgatatctcttagcgatcgctttcgcgaaatcgatgatgagatagtcaaagcttggactggagttttacggcaatacaacctcttccagttcctcgattacagctatatagttacctccagtggttttgaagacgaaacagaactgggacaattctggcttccgcctcctacagatagggaaaaaccttcaaataatagcgatccgatttgggaacagattaaaacccttgtcttcgagccagatgcgatcgctttaattgattatatggcaatccataactggcaagtacccgaagtaggatatgaacttaccgatgataccgatacagttattgccgaagcagaattagcctggagcgatcgctacttagctttagtaatagattcaagcgaaactgaaatctttacccaaaacaactggacaacactaactatagccgaagtcttaaataacccagaagccttttatcatcaacatctagccaattaaaacttattacttattacctattacttattacttaaaagaagatgctaaaccacaatatccgaatggcgatcgctactgactttttagatgcttttagtaagctaaccaaacagactcaagctaaaaccaatgcttttattagtaaatttaaacaaaatcctactagttcgggcattaactacgaatcaatccaaaatgctgccgataaaaatctcaaatccgtcagaatcgacgttagctatcgagcgatcgttctcaaacccgaaactggtaatacttatctactattatgggtagataatcacgatcgagcttatcaatgggcgcaaagaagagtttgtaaaattaatcccgaatctggtgcattacaaattattgatgtcgaagaagtagcagcgattgaaagagaaatagaagcaaaggctaaaacatccgccaaaaaaagatttgcagatattcacgatcgccatttattacgcttgggagtacccgaagaattattagcagcagttcggtctgttattaccgatgatgatgtagataaattaatttccaaattaccagaagaagctgccgacgctattttattactcgctgctggttactccctagatgatgtgctaaatctacaggacaaaaaaagcgatcgccaaattaatacagaagacttcgatgcagctttggaaacaaatgatagtaagcgtagattttatatcgtcgaagatgatgccgaattagaagaaatgctggctgcacctttagaaaaatggcgcgtctttctccatccaactcagcgtcgtttggtagaaaaagagtggaatggggcagtaagagtattagggggcgcgggtacgggaaaaactgtagtagccatgcaccgagctaaatggctagcagaacatcgttttaccttatctacagatcgtattttctttactacttatactcgcaatttagcgatcgatattgaaaataacttacgcaaaatctgttctccagagataatgcgtcggattcatgtagaaaatatcgatagttgggtagtgaattttctcaaacaagaaggaattaaagcccgaattgtttacgaaaacgatttagagcaattgtgggaacaagcttatactcttgcgccagaattttccctagctttctatcaagatgaatggcgtgaagtaattcaaccctaccaagttaaaacacttaaagaatatttaaaagcaccaagagtaggtaggggtactagactcaatcgagccaagaaagccgaaatctggggtgtatttgcggaatttaactctctccttcaagaaaaaggctggaaagatcgacaaactgctttgagagatgcttgtagcttactgaaaaataagcagggagaaactttaccttttaaagcagtaattgtcgatgaagcccaggatatgggtacagaagctttttccttactacgagcgatgattccagtaggaccaaatgacctatttatagttggcgatcctcaccaacgcatttatcaacataaagttgttttaagtcattctggtattgaaatacggggacgttctcgcagattgagattaaattaccgaacgaccgatgaaattcgtaaatgggcatctcaagttttaattggttctatctttgacgatttagacggcggacaaaacgacttgaatgactatcgttctttacttcatggcaaagaaccgtcaattaagggatttacaacctttaacgatgaaattaaatatattaccgagcaacttcaacgtatcgaacgagaagaagatactttatccagtagttgtttaattctacgaaccaaatctttaattgactcttattccaaagctttaaatactcttggtgtcacaacttgccaaatccatagaagccaagcggacgatctgacaactccaggattaagagtagccacaatgcaccgagttaagggattacagtttgaatacgtgcttttagcaggtttgactaaagacgaacttccaccaaaaagaatacttgatcgcttgtcagataatagagcgcgtttgtctttgatagaaagcgatcgctgtttgcttcacgtcgctgctactcgcgctaagaaagaagttttggttacttatcacggtcaaccaagcgagttattaggttgttagattcgcgatcgcataatatctaaattgttctagataggcgatcgcaaaataaaaaataatttctcatttatccccactgccattgctgttgttgaagctcttgttctacctcctgagattcggatgtcatttctcgtgctgcaatttgattacccaaaaccgcttctaaatctttagttaaatccagacaggacattcctttaactccccgtatctcaatctttacctgtccgtctttttcgataaagacatcaatttcctgaagttccattgttaattagctcctatactacacgtcgtaacactagatgaatgcgatcgccttcttgagtttcttcattgatgagagaaaatccctgttcttctaatttggctttggctgcatgatagggtttgagtcaatctttgcaatacggtttctagttcctcattttggggtaagggatattctaaaataaccgcttcatctttcaattccacgggaatcttccctgaaggggcagtaatcaaaattgacttcttactaaacttaagccgttgggcgacgctgcgaagtttacgtttaatttggggattagtccaacagtcgtgaaaatctttaagtacaaataaactatctccttcagctttatccacctgttccaatgccgaaagggggtctttagctgaaggaatcgaaccccgccaattagttaccgcactaaacccatcagcgacatcccaactgagacaggaacgctgagtgcgctcgcgaagagcgaacccctcgcatacctgcttgacgctctgtaatgccctctcttcctctggcgttaccaagatcattagagtaaagcgcgatcttaagtaaatgtccagttcctgctcaaacgccatactttactcctccagagcgatcgctcttttgtaacagccgtatttttcccgaatataactattcattcccagaaacgtaaattcgggtaattgcggaaatattaaggagattcaaagcaaggttgctcttatttgcctgtttttaccctcaattactgataaatcctatttaatcaaaattttgaatttgagagaagttcgattagctttgtcgttcctcagaaattaattcggtaacaattgagtttggttattacaaataaacaatagagctttttcaattatttttttaacaaatagttaagttgacagattgcggtcttaaagaaatttgccctgactagacgattgattctgaacaaaaacaagatgacgaaactgagctaataattcttgttcgattctagttaatactttgtagttgttgcattcgatccaaatgacttgaatatcggagctttttggagttttactagctttaattttttctagtttttcgataaaagtctgctcggcaaatcttttttttaaattagaactagaacccaagtaggcaaactgagcaaaatctgttgccaaaaatgcacccattttttctggtaagcgatcgcgttctgttaaagataacgaatgtgttagggaaattacaaactcttcagataagctactttgctcggctaatggaagcgaacctcttcctacttgttcgactaattccgagcgcgacaaattgagttcctgagaaagtcgatctaaccccgcgatcgcagttggcgttaaggacaaatttactctctttttgacttcatcatgaagttctgggactcctttcgatttcttttgtcctttaggcattatgacaagttttttaatcaaaaaaattggtgaaaacttctttagtttagtctcgatttttaatttaattgtgactcaattgagtctctcaatattttattacattggtttttttgcaattgttggggctggattatttgagtttgacgaaccgttttcatcagtaaagtaatgtttacaaatcttttagattatacgtattaaaattgtgtatgatctaaatagcagaattacaaggacatagttcgatgttgtccgaaaacgattttcagcattggtgcgatcgcaacaaaatatcagaggaagcaaagcaagagatacaaattattcgctcatctgaaccctctcgtaaagttggaggaggaaagcgaagtgtttctggaaggtattcaagccaaaaaatgggcgttacgattcagtttgaatcgcataaagtagaattgcccttcatttatcagctagaacacgatgaagatgttctggaatactacgatcaaccgccaccttttaaactgagctatcaatctgagtctggaaaaaacattggatttttttatactccagatttttttgtaatccgcacagatagtgcaggttggtgggaatgtaaaaccgaagaaaacctccagaaattagcccaaaaaaatcccaatcgttattttttagatgatgataatcattggcgttgtccttctgccgaagattatgccaatcggtttgggtgggacttttctatttggtcgagtgctagcgtaaattggacaatgcagcgaaacttagaatttttagaggattactatcgactaagaggcagaaaaaaacttaatgaatctagttttattgcaattatttcaattattaaagctaaaccaggaattactttattagaattatttcatgtctctgaaaatatcgaggctgatgacatttaccatttgatcgcccaagaaacaatttacctcgatttaagtgttgcccctctagtagaacctgaaaaatgtttactattttgcgatcgcgttacggctttatcttatagtgctattactgcttctcaagccacaaataatacagttatttctccaataattgaccttaatgtgggaaatattgttatttacaatggtaaagctctaactattgctttaattggcgaagataatatacttttgcaaacagcagaaaatcagtctattgagtttcctcaagatacttttgaaaatttaattcgccaaggaaaaattactagcttccaaaagactaaaactaatgaaatcgatcctcaagctttagagttattacaacaagctagcgaaaaagacttaaaagatgccaattatcgttatcattcaattcagccatatttaaatggtgagcctattagaagagatactcctcaagaaaggtctttgagaaactggttgtcagcatataacaaagctcgacatcagtatggttatggttatcttggattacttagttttgaacaccaaaaaggaaaccgtaacagaaggttgcctcaaaatattttagataaaatcgacgattttattgaaaatcactacgaaacaaaaaaacaaccaacaaaacaatcgacctatgcagcttttgctaatttttgcgctcaagctggaattcccgattgccaaatacccacctataaaacttttatcaaagaaataaaaaaacactctggatacgaacaaactctcaaaagagcaggttctcgggctgcttatgaattagagcaattttactgggaattaaatctaactacccctcgtcatggtgatttcccttttcatatctgtcacatagatcacacacaatcggatattgaactgagatgttctaaaacaggaaaaagtttgggaagaccttggattacttttcttgtagatgccttttctcgtagcattttagctgtttatattacttacgacccgccatcataccgttcttgcatgatggttttaagaatctgcgtacaacgtcatgggcgattgcctcaaacaatcattacagataacggtaaagagtttcatagcacttattttgagactcttttagctatgtttgaatgtactcttaagcatcgtcctgctgcaaaatccagattcagtggggtttgcgaaagattatttggaactactaatcaacagttgctctacaatttagcaggaaatactcaaattaccaaaaaagtcagacttgccactaaatcggttaatcccaaaaacctatctctttggaatattggtcttttatatctttatctttgtgagtgggcatacgaagtttacgagacaacagaacatcctgccctagatggttatagcccgagagaagcatttattaatggggtcaaacagtttggtaatcgcgatcttcggcgaattgcttacgacaacaattttaaaattttaactctacccaccacatcccaaggaaaagccaaagttagaccaggaaaaggcgtaaagatagagtacaaagattactggcacaatgctttgcgcgatcccgaaatagaaaacaattgggtcgatgttagatacgacccttttaatgcgggaatcgcttacgtttatgttcgaggtcagtgggttgaatgtattagtgaatattatcctttatttcgaggacgttccgaaaaagagattcgcttggctactgctgaattgaaaaaacgccatcaaaatcaccacggcaattacaaaattagagccaagcaattaggaaattttttagccaaaacagaaacagaagaaatactgctagaacagcgtttacgcgatgaacagactcatgaagtttttcgagttattgagggaggcacgcccaatgttctaccttttacttctccgacgataaccgtcgaggaaactgttaacactcgctcgaaaccaaatatgccagtagaagagaagtcttcatctgatgcgatcgagcctcccaaatttaaaagatttaaaaaatattaatcatgtcttcagaaagagaatttcctttagagctattaaaagccaataaagagcatcgtcttaattactacgatgaatatacaatggctcatcctttcttagatcgagcttttgaagacctcaagcctctagttcggcattgtggagaaacaaggctaattttcattgtcggtccaacaggagtcggcaagactaaattgagacagctaactgaaaaatggattttagagaaactatgggaatcaattagaagtaatatgggtcacttagcagtagccagtgtggaagctgtattgcaaaaatcgggtttatttaatgccaaagaccacctcaaacgctgtttgtatgctcttcacgaaccagaagaatttatcaaaaacaaaattaattatggggtcgatggtatttatcggactgatgaaggaaaattggcaattaaatcgagaatcttagaaaccgatttaggttgggcattagagcaagctttaaaacaccgccatccacagattttttttatagacgaggctcatcatatgctggcggttgccagtggacgtaaactgacagaagtaccagaagcgatcaagtctttggctaaccgaacagaagttttacatggattgatcggtacatacgatctgttgactcttcatgatattggcgatcaattgagcagaagaagtctttacattcacttacctcgctatgatgccaaatttattgaagatagagaagattggcaaagtattgtctggaattttcagactcagattcccattgaagaagagccagattttgtatctgattgggaatatctttatgagcgaagtttgggttgtgtaggaatacttaaaaattggacaagaaatgcttttgccgatgcgatggaggacgaagcaaaaacagttactcttaagcatttagaacgacgagctttgtctatcggtcagtgtcgcaatatcctcaaaaaaatcaaagagggtgaaaacaactacgctgcgatcgaaggagaagttgaaaaacttcgtacagagcttgaattaggtattgagcctatttctaggacacaaccaatatctcaatcttattcaggagcaaatcaaacagctagtcaaaaaccaaaatctaaacaagctgtcggtcaacgtagagctaaacgcgatcgagtaggaatagataaagatgcaggataaaatcttcaaaaaatatcgctccctaaaattacaatgtacacctgaaaggtctagcaagttgtattctattactcctatagggataggcaattccttaattgaaagtcttaccagttacatttctcgacttgcattagctcattgtgtttatcctggaattttaatggaaagggttgtaagctcggttattgataaaaaatatagtagtgctgatatacataagctatatagttttactgatgctattaatggcactggtgtaatgggattagatattgttaatgctttagaaaagcttacttttcaaaatcggctttcgttactaactttgacaaatctatcagaattaattccttcacgaaaattacttcatgattataaattgtggtgtcctcaatgctatagaaattgtcacacacgcagcgaagaaatatacgaacctttgatttggaaattaaaaactgtagccgtatgttctattcacaatttgcctcttcaagaattctgtccttactgtttaaaaaaaaattatcatcttgcttggaaaactcgtcctggttactgttctcagtgtggacagtggctaggagaattgaaagcatacgatcaaagtttactggctaaggaaaaagatgaaacactaaattggcatctttgggttagtaaaaatcttgaagagttactgataaaaaactcatctcgtgatgttacctggtctaaaaatactattagtcaatctttgatgagatacgctcaacaaaacgctgagggaaatattgcagctttagcccgtcagttagaaatgccaaaaaatactgtttggttatggtgtaaaggaaaaaatcagcctactttagaaatgttattacgtatttgttatggtttaaaagtatcagtttggaattttttgactcaagaaaatttaatagaatcagaaaaagtacatttaatcgcttctccacctgagttaaaatcaaaagctaagagtaaagttctagaactcgataaaataaaagaatatttagagcaagtcataaaaaaagaaactatacctcctccttctatggaacaagtagcaagagatttacaatttcagcgacggactatatccaggcattttcctgaactatgtcgagtaatctcagccaactacaccaaacacagaaaagccacacatcgacaagcgatcgagagttcttgtcaggaagtacgagaagctgtcaaacaactgcatagtgaagggaaatatcccagtcacaataaagtagaaaagctaatttctcgacctggactattgagatatgaggaagtgaaaaaagcctttaccaaagcaaaacaagaattaaattttaaataattgcttcagttatcattttagtttgccttttgttgcgatctcgcaaagcgagccactgcgtcaacgcacgataccagaaacctttttagttattaactataatatttctatctaagtattgattatcgtgcatcggaagtataagatttccgcagtgcattagaagtataagctttccgtggcggaaaagttatgcttccagtgacaacacaacatttaataattgaatttacaacagatggagctaaccggactcgaaccggtgac

SEQ ID NO: 889 - DNA, 12887 bp, unidentified
  misc_feature 1..12887: note = Synthetic
  source 1..12887: mol_type = other DNA
aatccgtgattacgacagtgagggtacagaatataggttaaaaattatcaaaaaaaattggaaccataagtttgccacatttgtgactttacccataactttgccgcgactagaaccataactttgccgccaacaacaccataacccttattcttacgtcagctaattttgggtgaaattggcatcttggaaccataattttgccgatagttcattttggaatgataagcctgccgtgagttcaatcgaatacagaaagcaggaaagagcagaaggggtttatgctggtgtcggagataaattttcatctatgacagccctattaattccaagtgaggaatatgtagacttaacttttaagttaagaggcgcacctattcctcttgataatggctatgttatctatagtgctttgtcaaggatttgtcctagtcttcacgaactgaagtctgttggaattcatccgattgctggaataccaactaggaacaatttgcttgagatcgcggctcaatctcgtttaaaaattcggatttttcatcaacacattcccctattgtatccctatttagcaggtcaaggttttcacataggtaaaaattcttatcaactagatattcccgattacaaaccgttaatttcctcagaaagcgtttattcacgattggttgtaatcaaagggtttcaagaacctagtaactttattgaagctgtgcaacggcaactagataatttagaaatacaaggaaaaattgaacttcttacccgaaaagatggaacacctcaaagaaggcaattaagcatcagtaagggagggaaacagtttaaagttagaggatttggcgtaaaggtaagcgaacttaaccctgaagattccttaaccttgcaagaacaaggtattgggggaaaacgaaagatgatgtgtggaatatttgtcccagcgactcgcaacaaggaagagaaggaaaccattacatgattgctacccaacccaaaatttccctatctctcgatgctgcggatacgacaatcatgcaccgcgctggaatgacgggactttacatgactttaaagcgattagaacagcaatatccctcatctcttcaacgggtagcatatgtatcatggcttttgactactgatactattaaattattctgggaaggaagtgatttagttgccttatcttggttaattaaggagtcttttaaattagatgatacaggtttaattcatttggcaggactagaaaatgatgaaatagatttaagtcataaaatccatattcatgaaggaatatctgctgtttttctgcgtcataatcggttttataaagcaggaaaattagttgacactgaattaacgcttgaagaacaaaaagtcgagtatcaatacaaatccctaacttggtatgcacatcaaaccttcgcggagaagttatgtgatacagatacccaaaaactgagatgtgattatgtgaaaataaccagttggttgtatttggggggaattgttcgtcatgcgaagacgcagaatattacaaaactggaagaaacacctgcatacgctttcgcattattatttgtaccagttgtttgtcattatttcttatttcatattccatcagaggatttgaaggaaaagaaaccccatcgctacctgatgttgattccagaaataaaagattttgaagatgcttctcaaagaagatggcggttacagcaattagaaactaaacagtttcatgttagtaaccttggtgaagcaggattaatttatcacagcttagacgatattcacactgaggttgattactatcaagcttgtcaagtttggttatatgaaaaaatgaatcaagcttcccgtcaaagaacattaatggggatagaagaaattaaaattgacaagaatactttaactgggcattgttagcaattgctagttataagcccgaccataaatctaccaatagagatgattattcattaataaacaatcaaaaactagaagaaatgaatgatgagtcagaagaagaatgataataatatccccaattattatctctacggaacagtcctcactcgctatgggttagcatccttaaatcatgacattagtcgaggcaataagactactctacaaaaaggctattggaatggtaaagttcactcttttgtaggttcaagtgcaattcggtgggcgttacgtttttatctgcaaaagcaaggttatttagttaatcgagtttgggacgaagatgaacatattaatcgattaacaagtgaagatttcgatccagaaaaattttatgacgatgatatttttgggtttgctttattagagtctgcggaaacagaggaggagacttcaacaaccaagaggaaaaagaaaaaaacaaaagtcagcagtcaaaatcagcgattgggtgctttaggaatgaatatggcggtgtcgcttacgccctatgatggtgcaattaagttaggggcaaaaagtggcagagaaaaggatagtaaatcgcttcatttcaccgaatatcatgcaactagatatcaatattattttgcaattaatgctactcatctcaaaggcttttcgcggattttacctctgatagatgggattatgaatctgcccaaggtaggaggaagtagtaatatttttaattatcctttctgtcccgatagtttggtattgcaatggacaaatcattttgcttcatatatttcctattgctttgaatattgcgaccctaagagtaaagaagcaaaactgacaaaagaatttatagatgaagtagaatgcgggcaaattgaccctagtacgttgtggattggaggaacaattgttaaggatttacagcaattagataattttgataattccccttttaaaaaggcgcatatttatcggaatagaaatgaaatgattgaagctttgaaaaccgtcattaaaagagatttgggcttaaaataatcaaaatgattgcaccattaattctctatttggatgttccatttgcgacttttcggaagtcccatgctagggaaatgggaaaaacctatcccgttcctcctccagcgacagtatatgggatgttgttgtctttggtaggggaaacggatgtttatcgccactgtggggtggaattggcgatcgcaatgttatctagtcccaagaaatcgcgaattttgcgtcaaatgagacggtttaagaatgctgattttagccacccggagaacgtgattcctggttatcaagaaattttgtctaatttgaagtgtttgatttgggttcgttctgatggggagaagatacaaccaagtttgagggagcggatacagtttgcattctcgcatcctgagttagttagacggtttggttgtctatttttgggagaaagtgaccagttgattaaatccatcaaacttgtttcagaagattatctaggggaggcgagacattgggtaattatggataatcaaggttggttaaccttaccctattgggttgaccatgtggggtcaagaaatacccggtttttgaggtatcggattgacgaaatggataaattgtcacctcctgaaaaggcgtggacgatgattcaatctccgatttgacaagtatctctgctggggaagggatttgagaaacaaaattaccggaaggattacagtgtgattttatcaaaacaccaccacgttctattttatgtgagtcttggttttatgccgttaggcgttgctcaagcatcaggtatgaataagccaaatgctatgatgggtgaatcttggttttatgccgttaggcgttactcaaaaatacagacaagcttctcctggataatcggtaggtgagtcttggctttatgccgttaggcgttgctcaatttactggattttgtccccaatgcggtcatatattgtgagtcttggctttatgccgttaggcgttgctcaacttaattccagcttgccctaaaattaatgtaaagttgtgagtcttggcttcatgccgttaggcgttgctcaaaaccatcaccccccagtgcttaacaactgttgttttgcgattgctgtaatcgatgcgctgtcgcttcaagcttttgaatcgcttcattcagatcaaggtcgattagtacttgtatagagtgtccactcggcttgccctttctttgatcaacctcatccagtaataaatcccgaacagatttaagccaatccaattcctcaagtaatttttcattgttgccatcgaacttatatcgttcttttagtgcaaaaccaatagtcgtctgatggtcaaatttgagttgcagcaagctttctacaaattcacttgtttttatctctttcaatataggtatttgagcatatctcagtcctggcacgccccaatcatgcgagttatttaaggagattatgtcgtgaaatttccattgatcgctttgcatgataccaagtagctggaattttcttttagcttcgtttcatcagtaacaataattacttttaattctttttgttctacaaaactgttgatatagcccagtatattgacaatatttatgctgcatcgctctaaatcatcaaatatcaaaatactttgctcaaggtttgtaaaaagctcagtaagcttcatacttggagttgtaagatttaatgttgcagcatcatttacatcaagttttaaactattctttaaaacttgtgtaataagatttctacctattgctactggcttagatgctagaaaaggaatctgttgttgcaagaaggcttcttctatttcggaaaagctagttacaccattaaggctaacatacaagcatttccgctttttatcccttaagctctcgcaataccttttgataaaccatgttttaccagatccccatttacctttaagcaaaacagcgaatccaggtgcatcaagcaaattacagtaataatctaaatactctattatatggctgttgagttgcgccttatgctgtgtcatgttgttcaaaattactaaagtcaatgctttttcatggtaaatcttgccagccatctcctgacaataaaaagcacgctctcaagatacgtacttttttctagtatcagtcggatgattctatcccatattttcagtaattgaaagcgatcgcactccctcaagccaaacacaaagaaattttcctagcggcaaaatactcctgaaactttaggtgaaaaagggaataataccgatgtaactggaattgatatcaatttttgatttatactaaacttctacaactttaattccagaccaaaattctcgaataatatcttgcccaattcccgaaaatccgacctaaataactgatatacactaatcctcgccttctcgcacacgggaataatcaactttaacagatgataaggttgattttgatttgtttttgaggctatcttcaaagattcgatgattctccctaaatctcccaataacaacaaatctttcccaattgcttgttcaaacactaacaaaattagttgtaattttcgggttaactcgattggaatgggttcatatcctaattggggagtaagggcaattaattcgctaattccttgaatcttaactcgatattcctcaatttcctcttcgcctttaatttcctgtcctaaccacccgtaacaacgagaacaaaatcccgcaggtgacaacttagcgatcgcaggtaaatgcgaaccacaatggggacattcttctattaatcgctgtttgtgaatcaaacaaaattctacgtccttaaatgaccataataatggctcatagatagttgtgttcttctgcctccactcttcccaacaacaaggacaccaagcacgatacttcctaaacaaccccttatcataaatcattcctttccagcttaaaagggtcaaaaagcgtaaatcctgacgcattgttaactcttctaagacagtgactaactgtcctgtcatttctcgcattccgttgatagctggtttagcgtcgctatttcccaacaggtgactcacattttttttcaatagctcagatttatcttcatttttgaggataagtggcgcaatttctcccataacgagcttttgagaggttaaacaatgctcctgggctaaacgatgaagataactactaagactttcagcatagggagttcccaccgccacgggttcaagagaaaataaccgactccgttgtggtatttttggaggttttaggttccaattttctaagtgaatagtcatccgtttgggattaaccattacgctcatactttagttttcaaagccaaatttcaggaactagtttccgattcgcttttaacctcgatgccgtaattcacaaaaatatcggagacagatatttctaaagctaccgctaacttaacaatattttttaacgaagggttacgctctccgttttcgatacctgagatgtaattgcgatgaagccctgacttctcagctagttcttcttgagacaaatctagctctcgccttcgtcgcctaatcgctttgccaaaacggtactcaatactgaagtgtttttttatcacaaaacaatagtgaactagtattgctgtaaaatctacctactatcagtagatttttgcacactataagtgttattattttaagtagtatgttatcaggtaaacaagttcctaactttatagtcttatttcgatagattcaaaaaataaagcgcaaagtgcttagtaaagactatgtcagtaactcccggctaaaagccgggagcttgcaagaaccaaattttgcgtgtctgactagcccgtgagccatcaatcggtaaagacttccggatgcttccccagtccggattatctctaaaactgtttggtcagttgcttgtagaaaggacatcttattgatggtgggcgaggggacttaaactttacacgaaggattatctctttatgcgtgtacctgtaattaactacgacagcgagccgttaatgcctaccaaacgaagtcgcgctcgacgttggataaaagaaggtaaagctataggcaaatggtctaaactaggcattttctacattcaattattaacacccgctagtggggataaagcccaagatattgctgttggaatcgacccaggcaaacaatttaccgggatcgcagttttatctcacaaaagcactttactgactattcacgttgatttaccctttaaaaatataactaaaagaatggctcaacgtgccatgatgcgacgttgtagaagaggtagaagaattaacaaaaaaataccctttaaccaacgtagtcatcgtcaaactagattcgataaccgtagacagaaaaaattacccccaagcataaacgcgaataaacaactagaaagacgaatactaggattaataattaagttatttccagtatcaaaggttgtttacgaagttgtaaaagcgtcggggaacaaagggtttagtccggtcatggtaggtcaaatagaccaatgcaaaaaattaagtaagcttgattatttatttgatttcaaaactcttcaaggttacgaaacttatcaaatccgcgaacacttaaagcttgaaaaagagaaaagtgataagtctttaaaaattcctcaaacccatgctgtagatggaattgccttagctgcttctaactggatgaattacggaattgttgacaataattcgatgggatggcgaggagagataaccttaactgattcaatatttctggttatttctagacctcctatcagtcgtagacagttacatttaatggttccaaacaaaggaggtaaaagacgtaaatatggtggtagtgttacacagcacggatatcgtaaaggtgataatgtcgaagctgttaaagctaataaaacttaccgtggatgggtaagtggagatactaatacccaagtttctgttagtaatgcaaactggaaacggcttggacagttctctaaaaataaagtgcgattaattcgacgttctactggtttaatcatcacatctcgaaaatatctagctaaaggcacttaaaagtaaaagtgctggtagcgtgttcctctccgcctgttagcgttagcgaagcgtctcccggagggaaatagttatccgcaaggacataggtatagagttccccaggactttcaaaacttatgaaagagcaatttgaacaatgggttgctcgccttcaaatatccgaggcagggcaaaaaataattgagaaagttcgctcatctgaaccatctcgtcgcgttggtggcggtagcaagaatgtttcgggacgctaccctagtcgcaagatggaagtcacgattcaatttgagtctcatcgggttgaactgccaattatctatcagttagaacacaatcaagatgttttagaattctacgatcaaccaccacaaattaaacttgactatcaagcaactaacgggcgtagattaggtgttttacataactggaaagccaaatatctaactgcacagcaaaaatacggttgcggctacattgggcttttgtcccatcgcagtgtcaaaggtaatcgtcagcgcaagttgcccgaagataccttagcaattatggagaaatttattttagaagactatgaaactataaaacaaaaaagaatgcgggaggtttatggggctttagttctagtttgcgaacaatctggtgtgattgctccgagttacaaagcatttaccaaagaaataaaacaccgtcctgtttacgaacaaactaaaaaacgcaaaggtcgtcgtgccgcttacaaacatgaatccttctattgggaactgactaaaactaccccaagacatggcgttcgcgaagcgcatgccgcaggcttatcgcccctttgaaattgggcatatagatcatacccagttagatgtagagctagtttgctctcgtacaggtagcaatcttggcagaccttgggcaacatttctagtagatgcttactcacgtcgattgctggcagtttacctaacctttgactcaccttcatatcgttcttgcttaatggcgctaagaatttgtgttcagcgtcacgctaggcttccccaaattgtagtcgtagataacggtgcagagtttaacagcacttactttgaaacgcttttagctacttttgaatgtacaaaaaagcaaagacccccagccaaagctcgctttggttccgtttgcgaacgcctatttggtacatccaatactcaatttgttcataacttagtcggtaatacacaaataactcgtaacgtccgccaagtaaccaagtcagtgaaccctaaaaatcaagctgtatggacacttggctcactttatgaatatctttgtacttgggcttacgaagtttacgatacagacgaacacccagcacttttccaaagtccaagggatgggtttgctgcggggatggcgatcagtggcaatcgagttcaccgcatgattccttacgatgaaaactttcagattcttaccctacctacaactaaaagtgggaaagcaaaagttcaaattggacgtggtgtaaaaattaactcaatttactactggtctaatagttttcgcgacccccaaattgaaaatacctctgtgcagataagatacgacccatttaatattggtatcgcttatgcctttgttcgaggacagtgggtagagtgtatttctcaatattatgcagaatttcaaggtcgttcagaaaaagaattgaagttagctagtgctgagttacgcaaacgctcctcaaatcatgcacggcaatctcaatcttatgctaagaaattagcagaatttttagcatctgtagaagaacaagaaggtctactagaacagcgctcctatgatgcagaagctagggaagtctttaggataattgacggcgggaaagcgacaaccagccgtaacgaacaaacaaaaattattccagctaattttgaaaatactgatactccagcggatcaagatgaagcacttatcccagatacacttgtagtttacgaggagttttaattatgacaaaatctactggatttccgcctgaactcctcaaacaatctgctacagaaaggcttgcctactttgagaattacaccgtagcacatcctcgacttaaagaagtctatgacaaactcatgggaacaattgccgaacccgcaggggcatcatttatctttgtttacggtgctagcggtgtcggtaaaacaactttgcggctccgtgtcgagcagaaattaacagaactagcattatcattactcgaaagcgatcgcggttgtgttcctgttgttggtgttgaagccgtagccccagaatcgagaaacttcaactggaaagattactacacacgcgccttaatcgccttagaagaacctttaatcgattacaagtttgattatggtgtgcgtggtatctctcgcgataataattttggcaaaattaatgttgagtcgaaagtagttgcacctgctttacgcagagctttagaaaatgctcttaagcatcgccatcctgacgtattttttgtagatgaagcacaacattttagcaagatggcaagcggacacaagcttcaagatcaattagattgtctcaaatctctagcaaatatgacagggattttgcattgtctattaggaacatacgaactacttacatttcgtaatttaagcggtcaactctcgcgtcgtagcgttgatattcattttcgccgttattgtgctgataatccagaagacgtacaggctttcaaaagcgtattgttgactttccaacagcatatgccactagcagaaactccagatttagttagccattgggaatatttgtatgagcgtagtttaggatgtgttggcatactgaaaaattggttaacacgcgcttttaaagatgctctcaatagagaagctacaaccgttacgctcaaagacttgcaacaacgggcttggtcggtcgctcaatgcaagaggatgtttcaagaaattcaagaaggagaaagacaattatctgaaacagaaacagatgtacaaaacttacgttctgcattaggacttgacacaaaaccaatcacgctatcagaagaaaccccaaaaaccactcgtccctcaagaaaggttggcaaacgcaaacctaaaagagaccccattggagtgcaggaagatgttagctaatgcattagaaacatacgaatcttgggatttaaagaagcttgctattccatctcgtagtcggttatatcaattagagcctattggtattggtactccctatgtagaaagcttaactggttatatatctcgattagctgaagctccgcagtgtgaatccaggggttttaatggaaaaggaactcgcaacacttgttaacaagaagtatgggagtactaatttacacaaaatttacaagcacactaccgcactcaacggtagtggtgtcatggcactggacttagttcaagctctacagaaattgacactacgtgaaaatttatgctttcttaccttacaaacttggtgcaaactattcccttctagaaatttactgcgccctgttcgagcttggtgtccgatttgttaccaagaatggtatgagaaaaaacaattaatttatgagcctttactttggtcgctagatgtagtggaaatatgcccctatcacaactataaattaattgttgagtgttctcattgtcatcaaaaaaacactacgctggcttggcgataagcccaaagggcatgcgcttcgcgatcgcgaccaggatattgttcaaaatgtggcaagtggttagggcttccatcccaagagccagtcaacaggaacactttgaaaaaaaatgagctagaacagaaaatatggattgctaaaactattggagaattaattgctgctactccatatttgaatgattctttatcttctaatacaatcgctctcaatctatctaagtgggttgagcaaattgcttttatgaaatatagctgaatttgctcgtcaaattaatattcctagaaatactgtttggctctggtgtaaaggtaaaaattcaccttctcttaaagcagtaacaaatatttgttactttcttggagtatcaattctcagctttttgacagaagaaactaacaatttatgtctctcaaggaaattattaacaactgaaattaaaagtaaatcaagaaaaaagagtaagccatttaattctgagaaaatcaaatccgacttagaagctttacttacaaatgatgagtctcctattttatctatggaagaagtagctaggcgattaggaattaatagaagaacgatttacaaatattttccagatttatgtcgtgctatttctgccaggtatgtcagttatcagaaagattaccataagaaaacacgcttaggagtgctgccaggaagtacggctagttgcttttgagctacataatcaaggtaaatatccttctgaatctgctgtttcaaaactagtttccaaaccaggttacttccgatacaagaaggttagattagctcttagagaagctaatcgcgaacttgggttgtgaagcttaaaaccgacattccgcacttcattatgtaatacgcacttaatgcacaaaattggaaaaagtcaagtatttataagtaaaaaatcaccaagctaaccataattattgtgttacttcgtaatacaatatgaaatacggaatatatgttaaaaattatcacgaaaaaatggaaccataagtttgccacattttattggaagcataagcttgccgttgcggcaaagttatgggtaaagtcacaacattttattggaagcataagctattaaaaatggagctaagcggattcgaaccgctgact

SEQ ID NO: 890 - DNA, 23391 bp, Nostoc sp.
  source 1..23391: mol_type = other DNA
aggaatactagctgcgtgcgtaggcgtagcccgccgtaggcatcgctctctaatgatatttgtgacttgacccataagcttgccgttgcggcaaagttatgggtaaagtcacattggcgatggcaatgagggcaattttgtacaagaggatgttgatgtattaaacaaactttaacatcttgaaatttttctcaaaatttccatctatggcagccatattaattcaaagtgaggaatatgtagacttaacgttcaagctcagaggcgcacctattcctcttgataatggttatgttatctatagtgcattgtctagaatttgtcctatccttcacgaactagagtctattgggattcatccgatcgcaggaataccaacaaggaacaatttgcttgaactcactgctcaatctcgcctcaaaattcggattcatcatcaacagattcctttaatttatccttatttagcgggtcaagcttttcacataggtcaaaattcttatcaactagatattcccgactacaaaccgttaatttcttcagaaagtgtctattccagattagtcataattacaggctttcaagactcgactaactttattgaagctgtgcaacggcaactggataataaaggaatacaaggaaaaatcgaatttcttacccgacaagatggaacacctcaaaaaagacaattaaccatcaatcaaaaagggaaacagtttaaagttagaggatttggcataaaaatcagctcactcacaccagaagattccttaaccttgcaagaacagggaattggcgggaaacgaaagatgatgtgtggaatattagtcccagcgactcatagcaaagaagaagaggaaacctaatcgtgtttgctacccaacccaaaatttccctatctctcgatgctgcggatacgacaataatgcaccgagtgggaatgacgggactttacatgactctaaagcgattagaaaagcaatatccctcatctggtcaacgcggagaacatatatcatggtctttgactgctgatactattgaattattctgggaaggaagtgatttcgttgccttatcttggttaattaaggagtcttttcaattagatgatacaggtttaattcatttaataggattagacaatgacgcaatagatttaagtcaaaaaattcatattcatgaaggaatatgtgcggttttcctgcgtcataatcaattttatcaagcaggagagatagttaacactgaactaacggttgaagaaaaaaaagttgagtatcaatacaaatccctaacttggtacgcacatcaaacttttgcagagaagttatgcgaggtagatacccaacaactcaggcaggattatgtgcaaataaccagttggttgtatttagggggaattgtccgccatgctaggacgcagaatactacaaaactggaagagaaacctgaatacgccttagcattattatttgtaccagtagtttgtcattattgcttacttcatattccaacagaagacttgaaggagaagaaacctcatcgctacttggtagtgattccagaaatcaaggattttgaagatgcttctcaaagaagatggcgattacagcaattagaagctaaacaacttcatgttagtagccttggtgaagcaggattactttattacagcttagacgatattcagcctgaaggcagctactatcaagcttgtcaagtctggttatatgaaaaaatgaataaggattctcgtcaaagaacattgatgagcatacaagaaattgaaattgataaaaatactttaatcacttatcaacaggttcaaaaatattttcaaaccaatgctcagaagattgaatataagcaaatttttattaaagtgaatccgattcgctccctgattgctgataatttagtgcaaggactctattggtggtctaatttttgggaaaaattggtgatggaggattcaaaagaatatttatttaaccagttatttctcaatcgggaaggattcataatcatggtagagaatagcgaagaagacaagcattatctgatttttattaaggtatttcagcaagctatgaagagcaactttgctaaaatgtatgccaaagctgaagaagggaaagaccctcccattaagaagaaagttgaacgattaagggcagagctaaactattgttatgatgaattgtcatttaaggaatatttgtccgactttttagtaagaggagggttaaataagtatttaaatcaaaatcaagcagaaattttattactaattaaaaaaacaccttggcaagaactaagaatttgggcattgttagcgatcgccagttataaacccaaagaaaaaaccatcaataaggatgatagtttaacgccaaacaatcaaaaactagaagaagtgaatgatgactctgaagaagaatgacaataatatccccaattattatctttacggaacagttctcactcgctatggtttagcgtccttaaatcatgacatgagactaggaaataagactactctgcaaaaaggcttttggaatggtaaaactcattcttttgtaggttcaagtgcaattcgttgggcgttacgcttttatcttcaaaagcaaggttatttagtgaatagagtttgggatgaggacgaacatctgaatcgattaacaagtgaatatttcgatccagaacaattttatgatgatgatatttttgggtttgctttattagagtctgcggaaacagagtctgagacttcaacaacaaagagaaaaaagaagcagacaaaaaccagcacttctaatcagcgaaggggtgctttagcaatgaatatggctgtgtcgctaacgccttatgatggtgcaatcaagttaggggcaaaaagtggcagagaaaaagatagcacatcgcttcattttacagaatatcatgcaactcgatatcaatattattttgaaattaatgccactcatctcaaagactattcgcggattttacctgtgatagatgggattatggaactgcccaaggtaggagggagtagtaatatttttaattatcctttctgtcccgatagtttggtattgcattggacaaataattttgcttcatatatttcctattgctttgaatattgcgagcctcagagtaaggaagcaaaatttacacaagaatttatagatgaagtggaatgcggacagattgaacctagtcaattgtggattgggggaacaattgttaaggatttacagcaattggataattttgatgattccccttttaagaaggcgcatatttatcgaaatcgaaatgaactgattgaaaatttgaaaacagtcattaaaaaagatttggggttagaagaatcaaaatgactgcgccattaattctctatttggatgttccttttgcgacttttcgggagtcccatgcaagggaaatgggaaaaacctaccctgtcccacctccagcaacagtgtatgggatgttgttgtctttggtaggggaaacggatgtctatcgccactgtggggtagaattggcgatcgcaatgttatctatccccaaaaagtcgcgagttttgcgtcaaatgagacggtttaagaatgcggattttagccatccagagaatagtattcccagttatcaagaaattttgtctaatctcaagtgtttgatttgggttcgttctgagggggagaagatacaaccaagtttaagggaaaggatacaattagcgtttgaccatcctgagctagtaagacggtttggctgtttatttttgggagaaagtgaccagttgattaaatcaatcaaacttgtctctcaagattatctacagggggtgagacattgggcgattagggataatcgaggcagattaaccttaccctattgggttgaccatgtggggtcaagaaatacgcgatttttaaggtatcgaattgaagaaatgccaagttcaccacctcctgatttggcgtggacaatggttcaatccccaatttgacaagtatctttatatgggaaacggaatttagggtggaagaatggcggcaaggtttacatgctaagggctatagtaattgaggcaaggaaaaaggtgcttgctatttttggaaaagtttatcagcactgggtttgagaggctgaaagtcagggaaggtttgctaagttttgcgtttttggtttctcaatttggaaggtagttgtaagattgtaaatgagccttcctcagttaagggttttcacctttgctgtaattcgtggcttgatgccgttaggcgttgctcagatgaagcctgccaattacccgatgttagtggttagtaattcgtggcttgatgccgttaggcgttgctcagggttctttgcagccatccccgactgctagtctcgcgtaattcgtggcttgatgccgttaggcgttgctcagcatattgacgctgactattgcccctatgagtgcgtgtgattcgtggcttcatgccgttaggcgttgctcaaagcgatcgcccactggtttaagatggagtgcgatcgctacttagtgcaaatcaaccagagagattttctatgcatacaagaaagagaggtaattcaattacctctccaagtgatgggataaatgcttcgtgtgctatgctgcgtcggctactagtaagccattaacagcgatgatgattatttgcgctgctaaaggtgtatcgcaacatggtctatcatcgctattacagggttgtgctacccatttcccttctagattttggtagaaagtgccaagtagttgagaaccattccagactctatacagttcacccaagtcatctggtactgagtcaatttcaatttctggtactactgggtcggcaagctggtcaatatattcctcgaactctgattcagccaaagctgagttaccaaagtcatcttgtacaatcatcataagtaacctcattaacggggttgaacaaaaggcgatcgcatttctcttgccggaggggcgatcgcttttttgctttcatcaaatatattagttactttagtagctaaaaacaagaagtatattcaaaactttaattagtcacttcgacagtactgagaaagtcacttaaagaaatatttaatgcagtacaaatagcctctaatacttttatagagacgctttcagattcaccgtactctagtttcttgaggttttgatgagagcattcccctcccctcgctgcaatttcatcagctagtttttgacgtgatttctttccccgcaatcgctttaaaagcattcctttatcttgattccaagcaactgctacaacatctgcaacataaatatacattctggtttttttatcgtccctattgctcatataatagctacagcagtaaacaaaatataaaattttgagctactacagtttacaaactataaggatttagagtaaaagtgagtttcctttatgcaaactgaattttgtgttgatctggataaaaatgcgatcgcaatgttgagattttgattcctgataagccattagcatctttagcggtgttttgccgcgcgggtcaatgactataaacttgccatgctcatctagcacaatattaggacttacgcactgtaccaaggaatcatcttgtgtgttagtctatacgttgcttagataccacttcttggcagtgcttgcgatcgcccagtacgagagataaatgacgaacggactgaacggacaaaacggacacaagaaaaagctagaaactcagctatggaatattgccgattcgcttcggggcaagatgaatgctgatgagtttcgggattattgcttagggtttattttctacaagtacctctctgagcggcagcatcttcatgccaataaattgttagccgaggatggcattgattttctggatattgatgaaacttcggaggaagggcaggaatatctaaaggcgattcaagaggagtcgatcgctaccctgggatattttctcaagccgtcagagttgtttagttcgttggcggaacgggcgttaggagctaaaaaagcccatgaggaaaatctagcagatgaggattttgaatcatctaactttattttggatgacctaacccaagtgctgaacagcatcgagcgatcaactatgggggaagaaagcgaagaggattttgatcacttatttgaggatctggatctgaattcgacgaagttggggcggactcccaaggcgaagaatgctttaattgccaagattttagtgcatctaaataaaattgattttcggttagaagataccgagagcgatgtgctgggggatgcctatgagtatttgattgggcagtttgccagtggtgcggggaagaaggcgggggaattttacacgccgcagcaagtgtctaaggtgttggcgaagattgtgacaacggggaagagtcggctgaagtcggtttatgatcccacttgtggatcgggttctttgttgttgcgggtggcgcgggaggtggaatcagtcggggatttttacgggcaggagatgaaccgcacgacttacaacctagcgcggggggtttcaatcagattgggaggacaggaatattaaaaatagaagctgcaacaaatcaagctatttcagttgttcgagtcaagaataacttagatcctcaatatctcttgttctttcttaatagcaatgtaaaaaaatgaaggaaatatgcaggtagtagtagaaaagatccaaatataactagcaaagatgttggtgattttttagtatacttcccaataaagaaagaacaagaaaaaatagctaacttcctaaacgcaatcgattgcaaaatcgaagccctctcccgccaaatcgagcagacagaaaaattcaaaaaaggcgtactgcaaaaactatttatttaggtactaaaatcaaagctaaatctatggaaaaagtcatttacaaaaccactacaaaacaacaaaccagtgactttcactactggcaaaatcagccaccccttaaacgtctcgaagccctagaacaaattcgccgagaataccaccaatataaatacaatgctgaaccaagacttcaaagaatttatacaattattaaacgccaatcaagttaaatatctgattattggtggttatgccgtcgccattcatggacacccccgctacaccaaagatatagatatttgggtagagatgtcaccagaaaacgccgataaactcataactgccctcgatcaatttggttttggtagccttggcttatctgcccaagactttcaaacccccgaccaaatcatacaactgggttatcctcccaatcgcattgatctaattactacccctgacggcattgattttgaaacctgctatagttcaaaaactgaaattattgttgataatattctcgtgcaatttattgacttagacaatcttaaaaaaaataaaaaagcatctggcagactacaagacctagctgatattgaaaatcttgaataataccacaaaaccaaaatcgaaaccctcacccgccaaattgagcaaaccgaaaaattcaaaaaaggcttactccaaaaactgtttatttgaaaaaagggaacaaggaataaaataaaagtattacccattacctaatagaaagtatggagatttaagcaatgctgaacttgcaaattaccaaagaacaagtatttagtttaattgaacaattatcttggacagaacaacaggagattttgcaatatttaagtcaaaaactccatagtcaaacagttgatagtcaatctaatcctgatcatacttcagagcatcccattaaccaactctcaggaaaaattacagcttttcaaggggttaatgctttagcttggcaagagcaaattagggagcagcaaataaaataaaagtatcacctattaccaaaaaaatgatcgctgctaaagacaaacccacaaacttaacccccgaagaatactttgcttgggaagaacagcaactagaaaaacacgaactgatcaacggtcaagtttatcctatgggtatctatgccatgaccggtggtagcaaaaaccatagtttacttgctgccagattgatcacattgtttaccaatcatttagaagggagtggctgcgaaactgcaacttcagacctacgaattaatattgtcggcacaaataactacatttacccagatgtcagcgtcacctgcgacgatcgcgacaaaaccacaacccaatatattacctacccctgcttaatcgtcgaagttctctcctccagcaccgaagcctacgacagaggtggcaagttccgaatgtaccgccaaaatccagccttaatcgattacctactagtcagttccactagtatcgaaattgacttgtatcacaaaaatgacgcaggcgattggttgattatcaactacaaaccaggcgacactatcgaactcaaaagcattaacctcaatttccccattgaacaagtctatcgcggtttaaccctcaccccagaaaccccagcagacatcattaaggaataggcagtattttataggtagtaggcaataaataatacctttattgtattcaccattcccctatgccccaaaccgaagccgaactagaacaaaaactgattgaacgtctagcaggactaggctacgaacctgtcacccttcgcaacgctgaagacttcaaagccaacctcaaaacccaactagaaaaacataaccacattaaactcagcgacacagaatttaaaagcatcctcaaccaccttgataaaggtaacgtctttgaccgcgccaaacgcctccgcgacaaaatggaactcaggcgcgacgatggcaccaccttttacctagaattcctcaacatagaacattggtgtcaaaaccaataccaagtcaccaaccaagtcacccagcaaggcaaatacaaaaaccgctacgacgtaaccctgctgattaacggcttgccccttgtccaaattgaactgaaacgccgagggctggaactcaaagaagccttcaaccaaatcaaccgctaccaacgccattcctacagtgcagacaatgggctgtttcagtatgtccaaatttttgtcatctccaacggtgtcaatacccgctactacgccaacaaccgcaaacaagaatataaacaaactttctactgggcagaccaagaaaacaacctcataacccaactagaggactttgccgacagctttctggagaaatgccacgtctccaaaatgatctgtaaatacattgtcctgcacgaatctgacaaagtgctgatggtgttgcgcccttaccaatactacgcagtagaagccattattgagcgagtgaaggataccgataaaaacggctatatctggcataccactggatcaggcaaaaccctcaccagtttcaaagctgcccaaattctcacccaactctccaaagtgcataaagtgctgtttgtcgttgatcgcgctgaccttgactaccaaaccagcaaagaatttaattattttagtcctgactgtgtagataccaccgacaacacaagacaactggtaacacaaatggctggggatagtagcctgatcgtcaccacgattcagaaactcaaccgtgcgataaaatcccaacgccatgaaaccgcaatggaaggcttgaaagataagcgcattgtgtttatctttgatgaatgccaccgttcccaatttggcgaaacccataaaaatatcgttaggttttttacccaagcccagatgttcggctttaccggaactcccatctttgccgataacgctgccagtaatcaacatggtaaacgcaccactagagacttattccaagaatgtctgcataaatatgtgatcactaatgcgatcgctgatgaaaacgttcttaaattttccgttgattattggggcaaactcaaacgcaaagatggaacactcatcacagagccaaaattaaacccagaattctttgaaaatcccgaccgaatttcactgattgttgattggattattgccaaccatgaccgtaaaacccacggcagaaaattctctgctatgctctgcgtcagtaacgtagatacgctaatcacttattacgaaaagtttaaaaataaacagaaacagggattacatgacctacgagtcattactatttttacccccagcgataacgaagaagacgaagacgcaaacggcttaattggagaacctgatttcaatatcagcacagatacgagcagccgcagccatagccgcgacaaattaaatgaatttatcgcggactataaccagatgtataaaacccagtattccgctaaagatagtcaggcattctatacctactataaagatatttccaaacgaatgaaggatagggatcgggaaaactttcaggatcaggaacgtgctgatattctgttaatcgtgaatatgtttcttacgggttttgatgttaagaaactcaatacgctctacgtcgataaaaatctgaagtaccacggattaattcaagcatactcccgtactaatcgcattttgggcgaacttaaatctcagggaaatattgtttgctttcgcaatcttaaggagaataccgatcaagccgtcgccctcttttccgatcctaacgccaacgaacaaattttcattgaaacctacgattactacattaaggaatttaatgaaggtgtgcaagaactgagagcgatcgccactatccctaacgatgtcaataagcttattagtgaagacgagcaagttaagtttgttaaagcctttcgtaatcttatccgtttacagaatgtaagtaaatcattcactgaatttagtttttccgacttaaatctggatgaacaaacctttgaagattataaaagcaaatatctagacatctatgatagaacgcgatccaagccagatgaagagaaagaatctttggttgaggaagtcgattttgaactggaactgatccagcgagacgaaatcaatgtcgcctatattctcaagctggtggctaacctccagcgcgatcggcaaacaaatatcacgccagaagaataccagagccaaaaagcctctattctggaaatcattggcaaagaagcccaattacgaagtaaacgggatctgctggagaaatttatcgatgagcggctacccacccttgaacccgaagaaaaagttgaaactgtctttcaagacttctggactcaagaacgtattgaagcaattcagcaactttgtatagaggaaaatctcaacgtcgaagttgttaatcaaatgattgccgactataaattttcagggaaagagccattaagagaaactgtgctgagtgcttgtaacgaaaaacccaaattattagatcgtaaaaaaatctttgcgcgagtcgtatcaaaattactcgacatcatcaacaaatttgatgacgctcttggtgagcttggggaagaagaataaaacagttctcaaagcaggcgatcgcatctgtagtagaactagatgcagacaagttagcccagatgttaccacttactgaagtaggaaggcaactttggactagaaatgctctgctttgtgaagatattcgtagagcgagcgcgcatttccaagaaatgtaaaaatttttaagcgctcctgaggtgggtataaactttgtgctacatttctaaacaatatatattcttctaatcttatgtctaattctgctattggtgttaggattcctcctaaccttaagaagcgcttggaaagccatattgccgagacgcattcaaccagaacagaagtaattttaaatgctttagctcagtatctgggtgcaagtgaagaagtgccattgagccagagagtatctgcattggaagctcaaatattagagctaaaaggtttggtcaaaaacatttcaagttccccaagttcttcatgacaagttcaacagctaggtcgaatgcgctggcacgttgaaaactgatgtggtcgtcagcatgatcgctacttacctcagctgtgctgagattgtgtgtgccgttaagccaattgctggctgagttagaaagctgatttatagcagagaatggcggctctagaggaacataacaaagaaaattaacagtctgctttacctagtaacttattagaaagctctatttaaggaaattgaaaacatgacacaagaagctaactttaagatcactatcgccattcaagatgcagatttagataacgacgagttacaagaagaaactcaaaacttgcgagaacaacttgaggaaagtgaaatcgtagaaagcgcagatttgatagcagttcatcaagcaccagcaggttcaaaggctttcggtggcttcattttaggactattaaacgcagaggttaatccggctaatattaaaaaattaatgggatttttgggcgatcgcttggggaataaacagattgagttagcactcaaaactcctgacggtagagaaatcaacctcaaagctagcagcagagaagagtttgaatttgtttaccaaaaagcacaagaatgggcaaaaggtaattccatcaccgaagagaaagctaacacagatgactaaaattgctttattaattgcagtaggtcaattcgattcgcgagatttagcttctctaccgaaaagctctgcggatgtggatgcaatgaaacaagcgttgatagatccagagttaggggggtttaaagaatctgacattactgtgttgaagaaccctaacaaacagcgaattgaagatgctgtttatgatttatttcataaaagtaaccgaaaaaaagaggatctcctgttattttacttctctggtcatggaattcttgatgaaaatgggatattctttttttccacttatgatactcgcaaggaaaatggtaaattacgccctactagtgccgtatcatccaattttgtacatcagtggatgaatcaatgtccatccaaacgaatggctattatcctcgactgttgtcacagtggggcatttgctaagggattaagtgctaaaggtactgctaacgctcaaatccaagagcagttaggaggtgaaggacgtgccatactcacggctgctagtgccaccgaatatgcttgggctaaggatgaatttgacctttctgtctatacccattatttcctagaaggtgttcgcacaggaaaagcaaataaagacggcaatgattggctttctctggaagaattacatgaatatgccaaggacaaaatatctgaagcaaaactcgaaatgaacccagagttttatccagtgaaacaagggtataagattcatctttttaaagtcaaaactactgctaaagagaagtatcaaaaagaaattcagccttatttaaagcgaggtaaaattcctaattttgttcgtcgttctttagaagatttgcgcgaaaaattacaactatctcaagaagaatgccaattaatagaacaagaacttttcgctcctattcagaagaaacaagaaaatttgaataaatatgaaaatgatttaagagaagcactagctgaggaaggttattttgatagtgatgggatttgggaagaattcaagcgaattcaggaaagatatgaacttcaggatgaagaaatagagccaatcaggcagaagattattcgtgaaatacagcaacagcaaaagcaacgagaacaggaagagtataataagaaacttcagcaatacgaacaggagttctcaaaagctgttgaaagagaatatcctttgagcagtcatactcggcagcaaatcaacagtttgcagcagtctttagaacttagacctgaagatatacagcggattgaacaaccgattctggctgctaagaatcaggaaaaactaaaggaacaagagaaacgaaaagaacaagaagcagaaagagccagacagttagagttacaaaagcaacgagaacaggaagagtataataagaaacttcagcaatacgaacaggagttctcaaaagctgttgaaagagaatatcctttgagcagtcatgctcggcagcaaatcaacagtttgcagcagtctttagaacttagacctgaagatatacagcggattgaacaaccgattctggctgctaagaatcaggagaaactaaaagaggaaaaaagacggaaagaacaagaagcagaaagagccagacagttagagttacaaaagcaacgagaacaggaagagtataataagaaacttcagcaatacgaacaggagttctcaaaagctgttgaaagagaatatcctttgagcagtcatgctcggcagcaaatcaacagtttgcagcagtctttagaacttagacctgaagatatacagcggattgaacaaccgattctggctgctaagaatcaggagaaactaaaagaggaaaaaagacggaaagaacaagaagtagaaagagctaaacaattagagctacaaaagcaacgagaacaggaagagtataataagaaacttcggcaatacgaacaggaattctcaaaagctgtggaacgagaatatcctttgagcattcatgctcggcagcaaatcaacagtttgcagcagtctttaggacttaaacctgaagatatagagcgaattgaacaaccgattctggctgctaagaatcaggagaaactaaaagaggaaaacagacggaaaaaacaagaagtagaaagagctaaacaattagagctacaaaagcaacgagaaaaagaagatcatcaaaaacgacgagaagaagcacaaaccagaattgatttttttaagcggttgcaatacataaatccaccaacttggtgtgttaaagcagcaacttggacagcttatggtgttggtggtgtcagtgctttattggctttggcaatcggcgtagaatggctaaaattttccgtgaggcctttacctacagctacccgccgtgcgccagtgattgtttatgctcgtgatggtgctaccccattacgcgaaccaagaaccacatctcacgtagagatgaagaggttagaggattttggcccttatttgccaaaagctgtgattgcttcggaagatagtcgttattactggcaccttggagttgatccattggggattttacgggctgttttaattaatagccgtagtggtgatgcacaacaaggtgctagtactgttacccaacaagttgcaaggagtttattccgcgactacgtgggtatacaagattccctggggcagaaactccgggaagcaatagtagcgctaaagcttgagactttttacagcaaagacgaaattttgctgacatatttaaatcgggcgtttcttggtggcgatacctcaggctttgaagatgctgcaaaatattactttgagaagtcggctaaagatttaactttggcagaggctgcaactttggtaggtattttaccaggccctaacgcctttgatttctgtggagatggcccgaataaactagaagcggctgaataccgcaatcgcgtgattaagcgaatggtggaaatgggccaaattaaagttgaggatgctaaccgtgctaaacgttccactgttcaagttagccccaaagtctgcgaacagcaagctaaaactctcagtccttatttttacaactatgttttccaagagttagagcaaattttgggagagggagcagcaaaagagggcaattatattattgaaacccagctagacttgggaatacaagcccaagccgaagcctccttacgcaattcagtcaacaattcaggtgcaagttttggtttttcccaaggggcgatggtgaccttggattccagcactggtggaattttggcaatggtaggaggcacagattataaaaaaagtcaatttaatcgtgcagttcaagctaaaagacaaccaggttcgacctttaaaatttttgcttacaccgcagcgattcagcaaggaatttcaccatatagaagctattcctgcgcgcctttaacttggcaaggtttagaaataaagccttgccaagttaaaggcgctggtactagtttagatatgtctacaggactggccctttccgaaaatccgattgctttgcgggtggcgagggaaattggtttagataaagttgtagctatggctcaacgtttaggagtaaaatcaccactcgatccagttcctggtttagtgctaggtcaaagcgtcgttgatgtcttggaaatgactggtgcttttggcgcaattggtaatcggggcgtgtggaatcgaccccatgcaattagtagaattttagacagtagtgattgccgcgatcgcaaagatttaaaaacctgtcgagtaatttactcctttgaccaagaccccgatgccaatagacgagtactatctaatgaggtagccgatcaaatgactactatgatgcgaggagtagttactagaggtacaggtcgcggtgctgctttgggattaggagaagctggtaaaacaggtacaaccgacaaaaacgttgacttatggtatatcggttttatccctagccgtcggctagtgactggtatctggctaggaaatgacaataattcccccacttctggtagtagcgctcaagcagcccagctatgggggaattatatgggacgaattgtcaagtaaataggggaaaagtagcggtgcatttatactaaacttctacaactttaattccagactaaaattcccgaacaatatcttgcccaattcctgaaaatctaacccaaacaactgggataaactaatcttcgccttctcgcacacaggaataatcagctttaccaaatgataaggttgactttgattttttgttgaggctatcctcaacgattccatgattccccctaaatctcccaataactgcaaatccttgccaatcgcttgttcaaacactaacaaaattaattgtaattttcgcgttaactcgatggggatgggttcatatcctaattggggagtaagtgcaattaattcgctaattccttgaatgttaatttgatatttctctatttcctcttcgcctttaatttcctgtcctaaccacccgtaacaacgagaacaaaatcccgctggcgaaaatttagccattacaggtaaacgggaaccacaatgaggacattcttctattaatcgctgtttgtgaatcaaacaaaattctacatccttaaatgaccataataatgcttcatatatagttttgttctcctgcatccactcttcccaacaacaaggacaccaagcgcgatagttccgaaataaccccttgtcataaatcatgcctttccagcttaaaagggtcaaaaagcgtaaatcttgacgcattgttaactcttctaagacaatgactaactttgctgtcatttctcgcattccattgatagctggtttcgcgtcgctatttcttaataggtgactcagattttttgccaatagctcagatttatcctcatctttgaggataagtggcgcaatttctcccataacaagcttttgagaagttaaacaatgcgcctgcgccaaacgatggagatagctactaagactttctgcgtagggagttcccaccgccacaggttcaagagaaaataaccgactccgttgcgggatttctaaaggttttagattccaatgttctaagtaaatagtcatccctcttggattaaccattacgctggtactttagttttaacagccaaatttcaggaattagtttccgattcactcttaacctcgatgccgtaattaacaaacagatcggagacagatatctccaaagctgctgctaacttaacaatattttttaacgaagggttacgctctccgttttcgatacctgagatgtagttgcgatgaagccctgacttttcagccagtgcttcttgggataaatctagctctcgccttcgccgcctaattgctttgccaaagcggtactcaatactgaagtgtttctgtgtcacaaaaccatactgaaccagtattgccgttaaatccatctactatcagtggatttttgcacactataagtgttataaagttaagtaatatagcatcagacaagcagattcctaactttatggtcttattttcatagactcataaactcaagtgcaaagcgcttagtaaggactatatgaaagagcaatttgaacaatgggttgctcgccttcaaatatccgaggcagggcaaaaaattattgagaaagttcgctcatctgagccatcccgtcgcgttggtggcggtagcaagaatgtttcgggacgctaccctagtcgcaagatgggagttacgattcaatttgaatctcatcgggttgaactgccaattatctatcagttagaacacgatgaagatgttctagaattctacgatcaaccaccacaaattaaacttgactatcaagcaagtaacggacgtagattaggcgttttacacaccccagatttctttgtcatccgaaccaattcggctggttgggaagagtgtaaaactgagcaggagttgaaaaaactagcagagaaaaaccccaatcgttacttttactttgaagaagataatcaatggcattgtccgccaggagaagtctatgctcaccagtttgggctttattaccgcattcgttcagatcgcgaaatcaattgggttgtacaacgtaatctgcaatttttagaagattattaccgagccgaatccctagcagtggaagaagcgatcgctcaatcattacttgcaattgtgtcatctcaaccaggaatcgttttagcagaactactcaatcagccaacaggagctaaatctgacgatatttacaccttaattgctcaagagcaaatctattttgatttaaatgctgcaccacttgctgaaccagaaagatgtctcatcttccgtgacgaacaaactgctaatgcttatagattaatagttgagaagccaagtgtaaatcttccggctatctctcctgtaattaatcttgccactggcacgcctgttagttgggacggcaaaggtttaaatatcatccatgttggagaaacagaggttatacttggtgcagaaaataatcagttaattgaactcaaaaaagctgtatttgagaatctggttcgccaaggaaaaatcacaagtctccaaacaccagaaaacacagctattagcacagaatcttggcagcgattttatcaagctagtcctgaagaccaagcagaagcccttgaacgctacaaaactatcgaaccttacttaaacggccatcccccagaaaacgaaacaataccagcccgtaccattcgtgactggaaagctaaatatctaactgcacttcaaaaatacggttgcggctacattgggcttttgtcccatcgcagtgtcaaaggtaatcgtcagcgcaagctgcctgaagacaccttagcaattatggagaggtttattttagaagactatgaaactctgaaacaaaaaagaatgttggaagtttacggggctttagttctagcttgcgaacaatctagtgtaattgctccgagttacaaagcatttactaaagaagtaaaacgccgtactggttacgaacaaactaaaaaacgccaaggtcgtcgtgccgcttaccagcatgaatccttctattgggagcttacccaaaaaaccccaagacacggcgatcgcccctttgaaattgggcatatcgaccatactcaattagatgtagagctagtttgctctcgtacaggccgcaatcttggcagaccttgggcaacatttcttgttgatgcttactcacggcgattgctggcagtatacgtaacctttgactcaccttcatatcgttcttgcttaatggtgctaagaatttgtgtccagcgtcacggtagacttccacaaattgtagtcgtagataacggtccagagtttgacagcaaatattttgaaatactacttgctacttttgaatgtacaaaaaagcaaagacccccagccaaagctcgttttggttcggtttgcgaacgcttatttggcacttccaatactcaatttgtccataacttactcggtaatacacaaataactcgtaacgtccgccaagtcaccaaatcagttaaccctaaaaatcaagctgtatggacacttggtttactttatgaatatctttgtgcttgggcttacgaagtttatgatacagacgaacatccggcacttttccagagtcccagggatgcgtttgctgcggggatggtgacgagtggcagtcggcttcaccgcatgattccttatgatgagaattttcagattcttaccctacctacaacctcagagggaaaagcaaaagttcaggttggacgcggtgtaaaaattaactcaatctactactggtctaatagtttccgcgacccccaaattgaaaatacttctgtcccaacaagatacgacccatttaatattggtatcgcttatgcctttgttcgaggacagtgggtacagtgtatttctcaatattattcacaactccaaggtcgttcagaaaaagaattgaagttagctagtgctgagttacgcaaacgccaacaaaattatggacgacaatctcaagtttcagctaagaatttagctgaatttttaacatctgtagaagcgcaagaaactctactagaacagcgttcctatgatgcagaagcaagagaagtcttcatagtaattgagggtggaaaagcagcaaccagccgtaacgaacaaccaaaactaattcaagttccttttgaaaatactgatactcaagtggctgaagatgaagcgatcgccccagaaacacttgtagtgtatgaggagttttcattatgacacaaactaatggatttccgcttgaactcctcacacgacctactccagaaaggttggcatactttgagaattacactgtaggacatcctcgacttaaagaagtctctgaaattctcatgcgaacaattgccgaacccgcaggggcatcatttatttttgtttatggccctagcggtgtcggtaaaacaactttgcgacttcgcgttgagcagaaattaacagaactagtattaccattactggaaagcgatcgcggtcgtgttcctgttgttggtgttgaagctgtagccccagaatcgagaaatttcaactggaaagattactacacacgcgccttaatcgctttagaagaacccttaatcgatcacaagtttgattacggtgtacgtggtatctctcgcgataattttggcaaaatcaatgttgagtccaaagtagttgcacctgctttacgcagagctttagaaaatgctctcatccatcgtcatccagacgtattttttgtagatgaagcccaacattttggcaagatggcaagcggatataagctacaagatcaattagactgcctcaaatctctagcaaatatgacagggattttacactgcctattaggaacttacgaattactgacattccgtaatttaagcggtcaactctcacgccgtagcgtcgatattcatttccgccgttattgtgctgaaaatccagaggatgtacaagctttcaaaagtgtattattaactttccagcagcagatgccgcttgcagaagctccagatttagttagtcattgggaatatttttacgaacgtactttaggatgtgttggcatactgaaaaattggttaacacgcgctcttaaagatgctttggatcgagaagcaacaacagtcactctcaaagacttacaaaaacgtgcttggtcggttgctcagtgtcagcgaatgttcaaggaaattcaagagggtgaacgacaattatctgaaacagaaacagatatacaaaacttacgctctgcattaggacttggcgcaaaaccaattgtgctacccgaagaaaccccaaaaactactcgtccgccagcaaaggttggcaaacgcaaacctaaaagagatcccatcggagtgcagcaagatgttagctaatggattagtaacatacgaatcttgggatttaaaacagctttctattccatctcgtagtttgttgtatcaattacagcctgttggcattagaacaccaatggtggaaagccttatttggtgtgaaattattcccacacgtaatttgtttcgtacccaaagcgcttggtgtgctgtatgttatgaagaatggagtttgaataaccaagtaatttataaaccactactttggactataaattccgtcaaagtatgtgctttacacaaaatatgtctatgtttgcaatgtcctcactgtcagcaagagttgccactactaagttggcgatcgcgacctggttactgttccaagtgtggtggttggttaggtatgaatcttcctgtcaagtccgcctcagaacttatggcttgctcaactttatctaaagaagaattacattcgcaaacttggatagtagaggttattggagaattaatttcttccaccctatcttttaagtctccaccagtaaaagaagaaattgccaagtctttgagtctggtcatagatgcagtgactgatggtaatatagctgagtttgctcggttgatgggaataccgaagaatactttatggatgtggcagacgggtaaagctttaccagtgcttgatatacttctgaaaatttgttatcgcttagaaatatctctgcttgatttactaaaaccagaacaacttgctgctaaatcttttacgaaaatctcacacaaaactattcggcgatcgcccacactaagagcatctccaaaacttttcgatgctaatcaagtacaagatgctttgttagcaatccttgcaagcgacaaagaaccaccactaacaatggaagaagtagctacaggtctaggatatgataggcggacaattttcaggcactttccagatttatgccgtgctatttctgccaaataccgtagttatggtaaagcatgtcacacagaaaagatacagcagtcttgcagagaagttaagcagattgtacttaagttgcatcatcaaggagaatacccttcagaagctcgtgtgtctgaaataatgactaatcctggatatctccgttacaaacaggttcgtgctgctttaaatgaaacacgacatgaaattggattctaaagctattaaacttaaaaagggtagacttagttagcttctttctgtatatatggaaaattggaagcataactttgccgccctctattggaaccataagcttgccgttgcggcaaagttatgggtaaagtcacacaacgacaaataattagtcactgtacaacaaatggacgtaactggattcgaaccagtgac

SEQ ID NO: 891 - DNA, 32767 bp, Anabaenopsis sp.
  source 1..32767: mol_type = other DNA
agacaatccaaacaagtcaagagttcgtagtcaatagtgtaaggatttttgagtgttgactagttttaaatcactggaatgcaatttaaagcttggttttgccgtactttaaagtttgattttgccaccacattgtttgaaatctcagcaactcagttccacgaatatcctaacataatcagtttttaaagcctgagtttgccgaaatagcaattttaaagtttgacattgccgaaatagtctgaacttgttatggtgttttataggtaaaattgtactaattttagaggagataaccatgctccatgatgtcgagtttcaagcatggtgtaatagtttgcgactctcccaacaacaaagagatttggttaaccaaattaggacttccccacctgctcgtaaagtcaaaggaggaggaagaaacgttcatggcccctatgctagttcaaagatgggtagaacgattcaatttgagtctcatactgttgaattaccagctattactcaattttatgaatatgacgaccaagttttagaatattgggatcaaccgattaaattcagtattaaatgctcaccacaaggtaaacaagccacaactatcagtcattatcccgatttttttgtaatgagaaagaattgttgtggttttgaagagtggaaaacagagaaaaaactggaaaaacttagtgaggaacagccttaccgctatcaaaaaatagaaagacaatgggtggatgtcattgttcaagaatatgtcgaaagcttaggatattattatcgccttcgctctgatagtgaaattgattgggtcaaatatcggaatcagaaatatttacaaccataggacttacgcattgacagaatgataaaataatgcgttaagaaacaagtgttgtctacaaagaggtatcggacaattagagaaatcagtaaaccctcaacagcacaatgcaatctggaacattacactctgtttttgttatcggaaccgaagcatggaggatgcagtaggttagcagaaatattggggaatgtttcacatgatagtgtgaaccgttttttgttgagggagagatacgatccctatgatttgttcgagatggtaaagactattatcaacttgacaggagggattttaagtgttgacgacacagttatagaaaagctgtacagcaatccaaaatatgcagaattaatcggttatttttggtcgggtaaatatcataaaagtatcaaagggctaaatttaattacgctgtattacagcgacatacatggaaactcagtgccaataaattacagaatatacgacaaaaaggaggggaaaaccaagaacgattatttccaagaaatgctaattgaagtgattgattggggtgtaaaaccaagactagtaacaggagatagttggtactcaggagtagaaaacttaaaatttttaagaaaccagaagttgggttttctatttggggttgagaaaaacagaactgtctctaatgaaccgggaaattactaccaagtaagtagtttagagattcctgatgaagggttggtaactcatctgagagaatttggatttatcaaattgtttaggaaagtcttcaaaaaagaagactctagacattatatattgcatctaccagatgcggaagctcttcaggaaataactcgaagtcaatttgtgacaattcatgatactcactggggaatagaaagttttcatagagccataaaacaagtatgtggaatttgtcgatttatggttagagatagccatgcaattaaaacacacatattttgctcacttcaagcatttgttcgtttagaactaatgcgctctgaaaacatcatttctaattggtatgaattacaaagaaacttgttcactttagttgtacgtgattacattgtggacaatctctccaatacttgtgctgcctagcacacatcaatgatattttttgtcaatgcgtaagtcctaaaccatataaacaaggatatttaaagcaacaatatatccttaatgaacaagtagaagccaatgttcaagagattatcgttaattatcccggtattaatctcaccaatctgcttgagaaggcgaaaaatgccactattgatgatattaataccttaattgccctcgaaaaagtctatgtaaatttaagcgaagtagctttggtggaacaagagaaagttcatctattccgtgacaaagctaccgcagaagcttatatcactgccactcatgattattgtgaacctgtatccagcaatgtgtcgatagttgaacttaaagtggggtcatcatttttgttagatggaaaaagcctcaccattgaccatattggggaaagtaaaatcattcttagaggagaacaaggaattattcgctggacttatgcagaatttcaacaattaatcgaattaggagaaattattaatcttcagacagaaaaccacacaactttagatgaagaaggatggcaatactttctagaggccagtcctaaagccttagaaactgcaaattatcgttatgcagctattaagccttttttagggaaagaacttgataattctcaaaaatgcgatttatcagaacgaactctacgcgactggaaagcaaaatatcgaaaagcccaacaaaaatacggatgtgggtttattggcttgattcctcaatataaaggcaatccaacccctcgttactccgatgaagatttagagtttattgatgaagtgattgaagaacaatatgaaacttttaaacaaaaaaatgtttggcagacgtatgaacttttaagggataaatggcagaaatcaggacgaatttctcctcttcccagtcataccttttattacgagagagtgaaaaaacgcaacagctatcaacaaactaaaaaacgaacgggatctcgtgcagcaaataatctgttggggccttggttaattcgaccgacgacccctcgtcatggagatcgcccgctcgaaattgttcatattgaccacacacagcttgatattgagtgtatctgcccctatagtggccaaaatttaggcagaccttgggtaacaggcatgattgatgcctatagccggaggattttagctttataccttacctttgataatccaagttaccgttcttgtatgatggctattcgcatctgtgtacaacggtttggacgatttcctgaatggattgttgtggataacggaaaagagtttagttctacttattttgagacattgttagcgcgttttgaagccagcaaaaagcatcgtcccaaggattgccctaaatttagttcaattattgaacgttggttcggctcacaaaatactgaatttattaataacttgagggggaatacccaaatcatgaagcacgtccgcctcgttaaaaaagcaaataatcccaagaatttagctgtctggaatttagaagaattatacgattatttggcatttggttatgcttatggagtttatgataaagcagagcatcctgctttagaaggaatgtctcctcataaggcttttgaattagggttagctaaaaccggacatcgccctcatcaatatattaagtatgatgagcaattcaagattttaaccttgccgacgaacaataagggaacagccaaagttattcctggtcaaggaattagagtcaactatcaaaattattggacagatgaattttacagtgttgagaatcaatctattccggttcgctatgacccactagattgtggtgttacttatgcctatgttaataatcattgggtaaaatgtttatctaattattatatgaagtttcaaggacattcagaaaaggcagtagcaatagccacaacaatttgcagacgaaaacggcaaatctataatcaaagtcaatatgtaggttctaaagagattgttgacttacttaataacgcggaagaacatgaagaattaatactacaaattcgtcgagatcaatctgctaaattagttttcaatttaattgaaggaaccctgagtagtgctgtattattaaatgtatcaaatactgaacagcattcatctcatgatagtcaaaagatagaagaaaatctagatttaatagatttaaaagaggagattttacagcctagtatacccaaaaaatttaatcctgatgatattcaggcttttgctgaagaggagttgtggtaatggttgcaaatcgacgttttccccaagaattgttacaagcaacaactgataataaacttaagtattttaaagatataattgttcctcatcgcaatattaaactggttctagaccagctactaaaaaatgctatagaaccggatgatgctttagtttatctagtgtttggggtaacaggggtaggaaaatcacggttaaaagcagagtttgaaaaacgattgcttaaacattttgcagacgaaattatttctaatccaggaagtttagtggtaggaggaatcgaggtagatggtgctgaagcaggaaagtttaactattctaactactatattcaagttttggaatctttgaaggaagttttaattgattataaagaaaattatggagttgatttagaggatgacaactcagataacctaataggagatcatgaaggaagaaactctaaagctttgcgtcgaacaatacaaaaggtttttctacaccgtcaattaaaagcttatacattagatgaagcacagcacttatttgatgttgcgggaggaagacaaataaatgttcaaatgaactggcttaagtcactggctaataaaactcaaacagttcatattttatttgggacttatgaacttttaaaatgtcaagaagtcaatggtcaagtgggacgaagaagtgaagattattatttacctccctactatctgactaaaccagaagaccaacaagaatttattaaggtaattaagactttacaacagtatttaccagttgaagttgaaccccaattagatgaacattgggaatattttatggaatactcgatagggtgtgtgggcattcttaaaagttggtggtatcgcgctctcaaaaatgcgttagatgagagggctaaaacagtcaggatgaaagattttaaagcgagggaattatcagcaggaagacgaaaaacaattcaaaaagagttagaagcaggagaaagccgtttagcttttctatataagaacgaggaaaaaattgaaaagcctgaatctatcaattctcaatccctgaaaaaaggtaggaaagttggggaacgtaaggtagggagagacttagtaggagttaatcaagagggatgagtattgatgaggaaatttggagtccaaaacctccagaaatcccgcaacggagtcggttattttctcttaaacctgtggcggtgggaaatccctatgcagaaagtcttagtagctatctccatcgtttagcgcaggcgcattgtttaaccactcaaaagctcgttatgggagaaattgcgccactgatcctcaaagatgaggataagtctgagctattagcaaaaaatctcagtcacctattgggaaatagcgatgctaaaccggctatcaatggaatgcgagaaatgacaacaaagttagtcactgtcttagaagagttaacaatgcgtcaggatttacggtttttgactcttttaagctggaaaggcatgatttatgacaaggggttatttcggaactatcgcgcttggtgtccttgttgttgggaagagtggatgcaggagaacaaaaatatctatgaaccattattatggtcatttaaggatgtagaattttgtttgattcacaaacagcgattagtagaagaatgtcctcactgtggttcgcgcttacctgtgatggctaggttttcacctgcgggattttgttctcgttgttacaggtggttagggcaggaaattaaaggcgaagaggaaatagagaaatatcaagttaatattcaaggaattagtgaattaatcgcacttactccccaattaggatataaacccatccccatcgagttaacccgaaaattacaactaattttgttggtgtttgaacaagcaattggcaaggatttgaagttattgggagatttagggggaatcatggaatcgttgaggatagcctcaaccacaaatcaaagtcaaccttatcatttggtgaagttgatttttcctgtgtgcgagaaggcgaagattagtgtatcccagttgtttgagtcagattttcaggagttgggcaagatattgttcgggaattttagtctggaattaaagttgtaaaagtttagtataagtaaagatttatgcttaaagaagtttggaagggaagagacaatcgcttttcctcaaattaaaagagcattcaatttcttgttattaatctctattctctatagagaatcacagcatttcgttttcgagagccaacatcataatgtaacgatgtattgaaattacggactggctgaaataagcagatgataatgcgaggtgatactggaagtgtcataagcatcttgcttggatgccattcatgaaaattttattagtagaagatgacagattactcagcactgcattaacagaattgctgaaggccaattactataatattgatttcgctgacaatgggaaaactgggctggacttggcaatgtcaggtgaatatgacttgattttgctggattggttaattcctcaactagatggtatcagtgtgtgtcggcaactgcgatcgcaaggctaccataaacccattctgttattaaccggaaaaaatactaatgcagatattgttgccgggttagatgctggggcagatgattacataatcaaaccatataatccagaagcattattagcaaaaattcgttctttgttacgccggactggggtagccgcatcatcaacactaacttggggaaatctttgtttagaccaagcttctggcaaagtaacctgtgatgagcagttaattgcactcacagcaacagaatacaaactgctggaattgttcttgcaaaaccccaatcgcatttttagccgcaggatgattttagatcagctttgggaatttgatgatgcaccagttgaaaatgcagtgacgactcacatcaaagatttacgtaagaagctaaaagcaggaggatttactgaagatatcctcgaaacggtatatggtatgggctatcgcttaaagccagccccagaacattctgttgctactcatgaagtcacttcagaacaaaaggaaaaaccccgtcccaaagatttagcttctgttaataaagtattagaaaaatttcgtgattctttttgtcaacaagtggcagtgctagaacaagccaaaactgcacttgaatcaggaaatttgtctgaagaactacagcaaactgcaaagtatgaagctcacaaactagcaggctcaatgggatcatttggttatccagaaggatctaagctggcaaggtcaattgagcatttattaataaacgatcgcaccctcacacatgatgaaattacacagttttctcaacttgtgacagcattgcaacaagagttaacaaaatctcctgttaccgcaacttctcaacctgctgttgtgcatcagactcatcgcatattggtgattgatgatgatactatactgagcgatcgcttgctggcagaagcagatgcttggggaatgcggatgaaaattgctcctgatttggcaactgctagatcgcgtcttgcactcttcactcctgatgcagtgctactagatttgagctttcctggtacagaagaagatggattaatattgctgcgggaattggtagagaagttacccgatttgccaattgtcgttttcactgcacgggacagccttgcagatcgattagctgtatcacgtttaggtgcaagacaatttttacataagcctgcaacaaccgagcaaatttttcgggcgatcgctcgtgttttgccgcaacgccaagtttcggaagctaaggtattaattgtagatgatgaccctgtaatgctgactggcttatcagcattgctcactccttggggcttggaggtaacaactctctcacaaccgcagcaattttgggaagtgctaacagcgacatttccagatttagtggtactagatttagaaatgccaatagttaatggtttagagttgtgtcaagttgtgcgccaagatgctcagtggggaaatatacccattctagtggtaacagcacatactgatgcagaatctcttcaacaggcttttgctgctggagccgatgattttattaccaaaccagtgctagggccagaacttgtgacacgggtactcagccgcatagagcgagtaagatcgcgtttacagccagatagagccagagataaaccaatatgagaaatttacgtttattgccctacagtgttgcaattggctcaactgcgatcgctctgttgctgtctctgtcgttagaagggcttgtctctcgaaccattggtgcttttttttatatagcgatcatgctaagtagctggtatggaggttttcgtccagggagcgttacagttgtcctctcaacgctggcaattgattatttctttattcctcctcaatattctctttttcccaccaaaccagacgatatattgcggctaggtcttttcctaatagttgcgttgacgattaacctcatcactagcaatcttgtcaccagcaaacaaaagattttgcaactaagccaaaaattagctcaggaaaatgccgagcaactgcggatggctctgtcggcagcgcagatggggatgtgggactggaatatggtgacaggagaaatcaagtggtcgccagaacacgaacaattatttggcttggctgtgggaaattttgatggtaaatacgaaacctttgcaagttatgttcatcctgatgaccttgccacagttgaacggtcagtaaaacaggcactacagactcatagtatttaccagcatgagtatcgcattatttgggcagacggtagcattcgctggcttgagggacggggcaacgcattttataacgaagcaggtgagcctgtccgtatgacagggacaatcatgtcaattgatgagcgcaaacaatctcaaatcaggctacaacagcaatttgataaacaacgcttagtgatgcagatgagccagcgcatcaggcgatcgctgaatttaaaagatattttgcaaaccactgttgatgaagtccggcagtttcttgagtgcgatcgcgtcactatcttccaattttctccaggttggggtggtactgttgttgtcgagtctgttgcacctggatcgatggctatcctaccactgcaaatttacgatccttgcattggtgaagaaaacgttgaaccttttaaacaaggcttagtgactgcaaaagctgatatttataatgcggatattagtccttgtcatgtggaatttcttgccagtctccaggtgagggcaaatctggtcgttccgattcttctaaaagaccaattgtgggggttactggcagctcatcactgtgcggctcctcgtgagtggcaatccgtagaaattactctcttgcggcagttaggagaacaggtgagtattgctatccagcaagcagctttgtttgaacagttacagactgagctaagggagcgtaaacaagcagaacaaagtttacaggaaagagaaacaaccttacgcttatttgctcagtatgcacctgctggtattgctatgttcgatcgggatatgcgttatttgattgcaagccaaagatgggtggaagattatcatctcgatgcggtggaatcgattatagggcgatcgcactacgaaatttttcccgaaattccagagcgatggcgacaaattcatcaacgttgtttggctgggttaatcgaaaaatgtgatgaagatttgtttatgcgagcagatggaactcagcagtggatatgctgggaaattcatccttggcatactgctacaggtgagattggcggcattatcatttttagtgacgatattacagagcgcaaacaggcgcaaatttccctgcaacaacttaatgccgaacttgagcaacggatagccgaacgcacagcacaactgactcaaacaaacgctcgcctgatagaaacagtaatccagcagcaaaaaacccaacttatacttttagaacaagcacaattactggatttagcacacgataccatcattacccgcgacttaaatggagcgatcgccttctggaacgaaggagccgaatatatgtacggctggacgaaagccgaagcattggggcaaataacgcatactctcctcaaaactcagtttcctcaaccattaaaagagattgaggcagaactcttagaaaagggttactgggagggagaactgattcatttgaggcgagatgctcgaccgattactgtagccagccgttgggttttacaaaaagacaacgctggtaaaccaattaagatccttgaaatcaataatgacattactgagcgcaaacaagcagaagcagctttacagcagtatatacatgaaattgaggatttgtacaataatgcgccctgtggttatcactctctagatgcagaagggaattgcattcggattaatgatacagaactgaagtggctaggatatagccgcgatgaaatgttacacaaaaattttttagatattgccacttctgggggtaaaaaaatattccaagaaaacttttctaagtttaagcagcatggtgtgattaataatttagagtttgaaattctgaacaaagatggcacaagccgatgggtaagcgtgaatgcgacagcaattaaagatgaagatggcaactttgtcatgagccgttcaagtatgtttgatattagcgaacagcaagctgcgctccgcgaacgcaaacgtaccgaagcaattctgcgccaatatgagggcattgtatctagtaccaaagatggcattgcactattaaatcgtaattacatttatcaaatcgttaatcaagcttacctagactggtgcaacaaacccgatactgaagttttaagtcattccgtaagggatgttttgggtgaaattttatttgataagtttattcagcctcggttagatagatgtctagctggagaaacaattcagtatgaaagatggtttgattacccgaatttagtaccgcaatttataagcgttacttatacaccttaccgcgaaccagacggcagcatttcgggcgttatcgttagcctgcgcgatctgactgaacttaaacaagcagaacaaatgctagaacttaaggctgtcattacccgaaacatggcagaaggagtctgcttggtaagtgctactgacggcagtatcgtctatgccaaccctaaatttgagcagatgtttggctatgacaagggtgaactaaatgggcaacacgtttcgattgttaactatgccactgaatcagtaacggctgaagatatcaatcaagctattcgctctgccgtcttacaaaagggtgaatccacctacgaagttcataatgtcaaaaaagatggaactcaattctggtgtagtgcgacttgctctgtattccagcatcctgaatacggcgatgttttggtggcggttcagcaagatatcactgatcgcaaacgcattgaagatgctttacgtgagcagggctgtttcattccctaagaagcttgaaaaatcaagggttatagcaaaataaaattgatgattttgctacctgcgtatcgagaaaatagacaatcgcactgttatttatgtgctgaatattctgtttcatcgttacccatacttatgatttttatcgctaaccatcttgacaaatcctgtttgagagggaacgaaacagccctgctttacgtgagagtgaagaaaagtttcgtcagttggcagaaaacatccaagcagtattttggatgacagatattcaaagtcagcaaattttatatgtgagtccagcttacgaaactatctggcaaagaagttaccaaagtgtttatcaaaatttttcagcttggttagatgctattcacccagacgatcgcccctttgtcaagagcgcattcgcacaacaagtagaaacagggcaatctgatacaaaatatcgcattatccgccctgatggttcaatacgttggattcgcgatcgcgctttcccaattaaaaatgaactaggtaaaatcgtgcgagttgccggaattgccgaagatatcacagaaattcaaaaaattgaacagatgaagagtgagtttattggcattgtttctcacgaactccgcacacctttaacctcgattcgggcatcactaggtttacttcaagctggtgtctacgacaaaaaaccagacaagtccaaacgtatgattgagattgctgccatagaaagcgatcgcctggtgcgcttagtcaacgatattctggatttagaacgcttagaatcaggccgtgcagtcttagaaaaaactctctgcgatgcaactgatttaatccagcaagcagtcgcaggagtgcaagcgatcgccaaacagcaaaatatgacatttgacattcatactacggaagctcaagttttggcggcgactgatgcgattattcaaacactcaccaatcttttgggtaatgcgattaaattctcgcctcccgatgccactattactttgagtgttcaacagcagatagattatgtactatttggaattagcgatcagggacgaggtatcccagccgataagttagaagctatttttggcagatttcagcaagtagatgcctctgattctcgcgccaaaggtggcacaggtttaggattagcaatttgtcgtagtattattgatcagcacggtgggcaaatctgggctgagagtactgttggtgtaggtagtacgtttttctttactctgccaaagaatagagaacaggaagaaagaataactaatgacaaatgactaaaagattgttgattgtggatgatgaagagcgaatccgcgaactagtacaggcttgcttagaagatttgggtggatgggacactctgactgttgcatctgggcaggaaggattaaagattgcccagacagaatctcatattgatgccattgtgcttgatgtgtctatgcctgatatggatggctttgcagtctacgagcaacttcaggcaaatcctgttactcaatcgataccagtaattttgttaaccgcgaaagtcctaccaagcgatcgcgcccgtttcgcccagatgggaattgccggagtgatcagcaaaccctttgaacccacaagcatttctgaggaaattgccgaaattctgggatgggacatataattttaactttcgtaaataagttagattctttattagttttttatttttttaaattaccttttttgtttacagataaaaatctttgacatcacaaaaaaggtacatgaatacttgtcagcttgaaagaattgaagaaactctaacctctactttatttcccctacacagctacgctctaggtgaaatcaaaaatcatcgctgcggcatttcagttttttatccacaaaccgtgatgattcgtgcgattgatttccaacagtggcagcaagttgttaacaatccgttgactgagcgagaactttgcgttctgaaaatgctggtcgatggcaaaagtaattctaacattgctgaagaactatatctgaccgtcggaactattaaaacccatgtccgcaatattttacgcaaacttgatgtgacggatcgcactcaggctactgtattagcactacgctctggcttagttgattaatagatatttttctggagtgtatttaaatgaaggctttggaggcgataaatataaccaccaaaaatatattaatcattgatgatgaactcaatgtacgcgagattgtagaactctgtctcaaagatttagctggttggaatgtagtaactgctgattctccatttacagggttgcaaagggctgtactcgatcagcccgatgcaattgtacttgattggtcaatgcgtggtatggataattttaagtttatcaagcaatttaaaagccatccccaaacgcaagcaattcctcttgtcttattaagtgccaaggcacggtggatagattcgcaaattcttcgagaatatcaaattgtcggtgtaattctcaaacccttcaatcctgttaccttacctgctcaaattgctgaaatactgggttgggattttaagtaccaatgaataaacagtctgcaatttgattattcaattaactggcaaactgcaaacataaataataaagtattttttagataaaaatattgttatgcacgtcaaacatatattagatactaaaattgaattaaagcaaatccttcaacaaattagaaagctaaatgtacgaattcatcaatcgctagacttagatgaaattctcaacatagttgtcagcgaagctagaaaaactttaaaaagcgatcgcgtgattatctatcgctttttacataatggcgatggagccatagccgaagagtctgtcagccacgcatggcaaccgattttagggcaattaatttacgatccttgctttcaagcagcatgggtagagaaatatcaaaatggatgggttagtgttattgaagatattaatactaaacagcttcacccttgttacaaaaagctactagaaagtttacaaattagagctaatttagtcgtaccaattttattaaataacctagaaattgagaaaaattctaattcatcgtctcaattgtggggcttattaattgctaaccattgcggtagttctcatcagtggaatgcgttagaaatagaatatctccgactagtagccgcagaactaggaactgcaatttggcaaacacaatgccatcaacgcctcaaaagtttaacagttcagccaaagttaaaatcgaaaccaattaaagtggctctgcataaaaattctcaagcatccaatacaacagaaccagcattaccaaagcacatatcagttgcagacttaacggcatttgaaagattacaaactcctgtttggatttatgatattgaaaaattgcagatgtggtgggctaattccgcggcgtttcatatttggaatactcaaagtcgagaagaactgctcagtcgcaactttggtgatgtttcaaaatccactcgcattcggctgcaaaactatctgcaacaatttcagcaaggcaaaaccattgctgagaactggacattttatccagaaggcaaacctgtttgggttcgctgtctttgttctgggattgaaattaaacctggacgaatggcaatgctcgttgaaggcagcacagaagccgtaaatcacattgataaagaaacactgcgctcaattgaagcactccgccataccacagtgatgatttcgctgtacacaatggatggtgtactgttgatgcaaaaccccgccgccagtcgctgttatggagataatctacacccaaattcttcaactgaaaatgtattcctgagtcactttgttgacaagcacgttgggcaacaggctatggaagccattaagttaggtgaggtgttcagcattgaaactcaggtttttactaatgaagggattcgatcgcatgggatagacataagatgtacccgcgatcccataacaggtaactctttaattcttgtcaatgaaaaggatattaccaagcagcaaactgctctagaagaacaccaacgtgcagaagacgagttgcgctggcaagaagctttgctgcgttcgatgacagacacatctttgctgggattctttgtggttgataatcgtactgacaaaatcctctattttaatcaccgcttttgtgaaatttggggcattgaacatctagaaactcaaatgcgctttggtgcgttgaaaaataatgagatcattcctgactgtatacctttaattgcagacttaccagcatttatagaatcttgtaaaccattacagtcagaagaaaatcgtgccattgttgaagacgaaattttatttgtcgatgggcgcacaattcgccgtttttctagccaaattcgagatcatcaagataaatactttgggcgactatacatttttgaggatattagcgatcgcaagaaattagaaaccgtactgcgagaaagtgaacaacgctatcgttctgtaattgcagcgatggcagaagggattgttttgcagcaagctgatggcagcattactgcctgtaacgagagtgctgaaagaattttggggttaaccgcccagcaaatgatgggcagaacttccatcgatccccggtggcaaaccattcatgaagatggttcagcttttcccggtgaaactcatccggctattgtcactttacgcactggacaaccccaatttaatattggtatgggagttcataaacctgatggcagcctaagttggatttcgattaattctcaaccattaattcagcccgatgaatcaacaccctatgcagtggtggcaacatttgcagatatcacagcccgcaaacaggctgaacttgcgctgcaacaacaaacacaacgggaaagtatgattgcggcgatcgctttacgtattcgtcagtccttagatatagataaaattttaaacacaactgttgccgaagtccgagattttctgcaaagcgatcgcgtcatcatctatcgctgtaacccagatggcagcgatactgttgtgacaaaatctgtagcagaaaattgtcatgttcagttattagaagtattaccagccaaagccaaactagttgtatcgattttacaaggcgatcgcctttggggtaagttagtgtccgatcattgcagcaccccgcgtcagtggcaaccttgggaaagtgaactgcttcatcaactggcgacacaggtagcaattgctattcagcaatcagaactttattaccagttacagatagctaaccaacaactggaaaatattgcgatgattgatcaactaacccaaattgccaatcgccgatgttttgatcgcaaactagaaagtgtatggcaatatatttcacaacaacaaggttgtgtctcacttctattatgtgacattgattatttcaaacaatataacgatacctacggtcacgctgctggagatgattgtttgcgccttgtagctggggctttgcaacaaactgtcaaacgttctacagatttagcggctcgttatggtggcgaagaatttgtagttattttacctaatactgacagtgatggcgcaattctggttgcccaagaaattcatcaagccatagcacaactaaatattcctcatgctgcatcggctgtgaagcctcacatcaccttaagtattggcattgcaacgataattcctacacttgatacggttactttagagttgattgaagccgcagatcaagccctttaccaagctaaagcccaaggacgcgatcgctcttgcatcaactcttaacttatatctgatgattaaaattgcagccataacaaagcctgtttccgcaggcttgaaaacctgattttacctgagtctgaataggcgaaacctaagagtaacaagtgactcgctacttcaattgtttgagtttggtacaaaatataaattatcaaaagttcgatgaacctctccccaacccctctccgagacggagaggggctttaatatcttagctaggaacgaaaaattaaggtttctaagcctctccccgcttcggggagaggtttggagaggggttctttatcatctgtcgaattcacgttaaattatcaaaactttactttttttgtttatattatttcctttcaaattattacaactttgcccttctttattagttctttattttttgtttataagtttaacttgttggcggataaagtcatagctctatcgctgacttcaattaacttattgacgaaaaaactaatcttatgacaaactgcccctgctgttcatcctcaatgcttcgtcacttccggttacatgaaacttattggttttgtcggcaatgctggcaagaaatgcctaatctgagtttaaaagaaaatcaggatatttcacatttgaatagagtagccaaattatcactcatcaaacaaactaataatttgcaaaattgtactgattttggttcgtatttaaccttatttactacattgacagagcataaatatgataagaaacttatcatccacagaaacaaacaaaaaaattcaaattcttgtagttgagaatgattatattcttgctcttaatcttcaagaaatattagagacattgggatatatcgttatagatactgttgattctgcggaattagcaattgaaaagtcccatcaatttcgtccagacttaattttaatggatattcaacttgctggtgaaatgaatggtattgaagcagccgaaaaaatttgggataatctgcaaattcctagtatttatgtcacaggctatgctgacaaaattcttttagaaagagtaacaaaaaattatccgtttatctacatatttaaaccagcaacaaagcaagaacttgatgaggcgattcaaaattattatcaacgaagtttaagattcaataaataaatcatttaagtcggttcaaattaatatgtagatgggttttcctgattataaaaaacaaaattaaacctaaacttacaaaaataattttaaaaagaagatagtaggtagttatgaaagatctaacttcagaaaaacctagggttttaattgcagatgatgatgaatgtatacaaattatatttagttttttgcttgagcaagaaggctgggaagtaaaacaagcaagagatggtcaagaagcactagactctgtattaaaatggcaaccaaacttgttgcttatggattacgaaatgccaaagttaacaggtgcagaagtttatcaaaaactgcaattatatggaataaaaattacagttatattgatttcatcatatatagatttagaacaattagctgcaagtttaggtattatttattatctgcataaaccttttgatattccagatttctttaaaataatcaagtttgcttgtaaaaatttaatatgtaaaggttaaggatatgtcaactgctgcaaaaatttaaatatatttgaggaacgattagctgttaaaatcgtaacaaattttgtcatatttctagtttgacacaaaaattattatttaataaaaaaatagttttgaaatgcaatcatcagacaaactcaatattacagaatttgttacatcagaatcgattgatttaactaactgcgatcgcgaaccgattcacattcccggactgattcagccacatggaatattgctgacattaagtgagccaaaactggaaattttacaagttagtgagaatgtcgagcaattattaggcattactgcggaaaacttgcttgggcaaccactaagtcggttatgctctaaaaccaaagttaaggaaatatctcaatatctaaaacacaataatttggaagtatttagtcctttagaggttaaaattcattctgcctcaacttcatcaactcagcaaaaaatacattcccaaaattttaaagggattttgcaccgcagcgacggagtgttagttatggagttagaaccgagtacagtaaataaaagtaagcagcttctcaagttttatcacttgctaaaacaggcgatcgcccaaattcgccaaaccgaaaccttcaatgatttagtcgcaactttagtcaaacaaattagacaaattaccggatttgatcgcgtcatggtttatcagtttgcaaccgataacagcggagttgtagttgcagaagataaagctgaacatctagaaacttacctaaatttacattacccaacttccgacattccccaacaagcccgccagctttattccgaaaattggctgcgactgattcctaatgccaactatcagccagcaaaactaattcccactgataatcccgttagcggtacgccactcaatcttggtaatgcccacttacgcagcgtttcacctctgcatatagaatatctgcaaaatatgggggttactgcttccatgtcgatttccttgattaacgaaaaacgactttgggggctgatagcttgtcaccattacactcccaagtatgttgattatgaaacccgtaaagcctgtgaatttcttggacagtttgcctcggtggaattggtttatcaacaacaacaagatttgaatcgctaccgcgctgatgttaaatcgattcaagagcaattgcgacaggcttttgcccaagaagttagctttattgaaccagtgctgcggcgtaacgaggtggaattattaaatttagttcacgcccaaggagccgcaattatcttagataacgaaatttcattactcggtcaaacaccatctagggatgaagttcaagcattgatgagttggctgtcacagcaagagagtcaagggtggtttgtgactgattctatctcgcaactatacctacaggcgcagcaatttaaagcagttgccagtggaatattggtaatttctattattctgcggcaaaaatcctatcatattgtttggtttcgaccagagcaaattcaaacagttaattgggctggtgatccccataaacctgtgtcactctcgaacgatggagaaatccgcctaacaccgcgtaaatcttttcaactttggaaacaaacagtccaagccacatcattaccttggcaacctgtcgagattgaagccgctgtagaaatgcgaaacacgctgatgctggcagtattagaattttcgcaagttgccctcgaacaagccgcagaaagagccgcgatcgctagtcgtgctaaaagccagttcctcgctaaaatgagccatgaactgcgtactccgttaaacgccatcctgggatttacgcagttaatggcacgtactgatgatacaccaagcgaatttcgtgaacatctgagcattattagccgcagtggagaacatttattaacactaatcaatgacgttttagaaatgtctaggattgaggcagggcaattaatcttaactgaaagctattttaatttgcagcggttactaacttctattaaagatatgtttgccttaaaagcttcggagaaaggcttaaatcttacaacccaatgggatgctaatctgccgtgctatgtctacggtgatgaagcaaaacttcgccaaatctcgatcaatttattaggcaatgcgattaagtttacaacaaaaggaactatcaccttacgagtaaaaactgtttcatcaagcaattctggctcatctcaaaagccaatcatcctgcatttagaagtcgaagacacaggctgtggcattgctcctgctgacatggaatcagtgtttgaagcttttatgcaaacacaacggggtcgccatgcccaaggtacaggtttaggtttatctatcagtcgtcagtttgcgcggttgatgggtggtgatattacactcaaaagcactttgaatcaaagctctacctttacttgtgaagtattgctacatttggcagacttgggagatttgctagagccagaagtaatccgccatgtcattggtttggaacccggtcaacctacttaccgcattcttgtagcagaagacgttctggaaaatcgtcaattgctcattaagttactgcaatcagtagggtttgaggtttgtgcagtagaaaatggccaagatgcgatcgctaaatggatagaatggcaaccgcacctgatttggatggatattcaaatgcctgtcatggatggttacacagccactaaacaaatccgtgcaacccagacaggtaaaaatgttgtcattattgctctaactgcttctgcatttgaagaagaccggattgctagtttgcaagcaggttgtaatgaccacttagccaaaccttttactgaaacagcactatttgaaaaaatggcacgttacttaggagtgcgctatctctacgcccaagaaaccatatcagagttaaacagcgtaacttcacaaccaaaagctttgacattccaagatttacaggtaatgccatcagagtggatcttgcaagtgcatgaagcagccctagatctaaatgatattaaactttacgaactgattgcccaaatttctccccaagaacagccccttgtagatacgctgaaatctttagtcgataacttccagctagaagcgatcgctacacttacccaatgttaattaaaactgttatgactagcttatttaaacctgcaactcaaactaatattttgcttgtagatgacactcctgataatttacgtttgttagccaaaattttagaattacaaggttatgtcgttcgcaaatcactcaatggcagaatggcattacaagctgcaagtcgagaaacaccagatttaattttgctcgacattaatatgccagatataaatggctatgaagtttgccagcagttaaaaattttagaaacgacacgtaatattccgattatttttattagtgcgcttgattcaattagcgataaaattcgagcttttgaaatgggaggacaagattacattgctaaaccattccaagagttagaagtactagcaagaattaaaaatcaattactcattcaacaacaacatcaccgtttagaacaagaaattcaacaacgcctacgtgccgaagctcaagttaagctaataaatcaaaatttagaacaacagatacaacttcgcactcaacaactacagcaatcgctcttctttgaagcgacacttaaacgtatttctgataaagttcgagatactctcaaccaacaccaaattttgcaaactgccgtagaagaacagggctgtttcattccacaagacgaagtagtttgtcaatatcatgagagagaaatctttgagcaatagtgatggaatgataactatgacgacgaaggatattgagtgcgattgctctgataatagaaagattagcgggagcgttgccaagacggattgtagaacagtcctctttgaaaacaacgtctttcacccagtgaaggcagttttcgataccccagtgtccacgaataccgatagcaaattctttcgcgcttgctatcagactgctaatataacaaacaatttcatgatatttcttagcgtttctcgtaccaattctttcgaccctgactaaagattttattccagtccatgacgggtcaattccattgatatcatgaaaaacttctacagtgcgtgttgtatatctatctctggttttttcggtttcaactacacgagaagttggtttttttgtggcagcaatgcgttgaatatggctacgtagtttgggttgattatctttaaccgcaatgacataatcattgccactttctataattattttgcaagttttttttgacaatgtagggaatcaaagctcaagaccactccttctagacccaatgcagtgattagctcttggacaacctggatttcgcttttttgctgattctcaaatttctccatcccgacaaccagccctcttttacaagcaaataccgatactatactcacgaaattttgattagatgaactgtagttttgcactgtacccttaatacttttcccatctgttgcacaccattctgatacctctaaatccacataagtttttgcccattcattaaatttatcagccagtttatcgaagtctactcccatcactacacgccggattgttgaatatgagggtactccatgtttttgaatgccaaatttctcgattaatactcgactatgccttttgacaaaatctccccacccccgatatcctacatatccattcattgttcccatgattaccaacagcaacactaaccacagtgggtgtcttcgcccatccgtcgttctaaagtcttccacttgctttaattgttcaatcagagccgcacccatcatttttatcccctcaacccttgctattttacctgttttagggaatgaaacagccctgccgtagaagaattagccaaagctttagaagttaaatgctgtgatgtagtactttatacaagcgatcgcaaatcctctgttatccgctaccaatatgttgtggcgaactgcaaacataaatcatcaaaactgcaatcaaggcaaatttgaaaccacaataaattgcaactagaggtggtctcaaaaccacaataattgcggcccaaaccacaataatcgcaacgaaactgcaaacaagcattctgaaaccacaataaatgcaactaggctataacttgtatctagagccagtttgaggggattgttgtttaaaaatgttcaaattaaacgaggaattaaagcagacagatgtgtacaaattattagatataaattgaacgtttatcgttcaaaaaaattgataatcaggtataatgtgacagttacaaaggaatcccacttttgagcagttgctctcgcaaatcttgagtgcggctggtaggtaactgaccttggagaaaagaacgaacctcagcagtccgtatatttaacaaattggctaaaactttggtattgtaaccttgccgaatcaggcgaggttctaaatcattgatgccagctgtcagcaccgcttcaatgattcctactgtcactggtttttgcccaattttataagcttcctcaaacgccagccccaggtagtgttcaatttgcagtggtgttaccagtttagccgccaatatttctaccgcttcatcttcaatcaggtcttcactaacgtgcggctcttcaatacactggcttaacaaccaatgaatatattgcttttgctgtcctttgataccttctaggctaaatacatctgtccgcgcaccaatctcttccaaactgggacggcgcaaatcatttttgagtttgggatgcccggctaaaaccacagaaagtgtaccgttgttgaagcgtgccatttcaattaactttttcagtcccaccagtgtcttaggacttaaatcatgagcttcatccacaaataatgctacgggtttacgacttttttgtattaaagacgctaacttacgttcccgttgctcaggttgactaggtaacttatgatccttatctgtagtcaagtcactaaacagagcagtcattaacgtgttcgagttgactttctctctatcgaccacgaaactgcgagaaatgatgatttctttttctgtggctaattctgattgcaatcgttgcaaggtagtcgttttcccacaaccaacaatccctgatatcgcaatcagccgaccagaacgaatcaggattttgagttccttgaacagttgcgtttgatactcagtttcaaagtaacccacatagtcaaaggtgcgcttgagattatagaagctcatgacctcactctgcatggagcctcccccctttgggatgaaaataatctcgaatctgcgacatcactgcttgtttattgagtgtattgctcaaaattgcatctacatcagccatctgaagtgatgtcagtttggctagcggttgtcccaaataatcggcgatcgccaatttcgccgcaatgatagtagggaaggtcagttcttgaaacgggtctgggtcttggaaagactgaacttttaattcaatctgactatctggactactgagcaaatctacttgaccaatggcggtagcaggtaatactaactctttagctaaagactcgattttatctgcacgctgttgtgtccgagttttcttgaagctgcggtagcgatgtaggggaatgggtgcgccaacggggttataagggccatagcgtcgtgagcctgcttccacatacagttcgttatcgaacaaaccccaccaaagaacgacagtttctccagctaaatcaggatctacttcatagctcaccccgtctacagtaatccgggcatcgatgcctaccttccggcgttctggttcgcgtgcaaatgtacaaaaacgctcccaattacacatttgacgaattcccgtcttgggtaagttggcaacccagtcttccatgcgggagtgaggttcactgcgatgggattgacggttgtaatggagtaaaaaccgcattaaccaagagtttgcttcagcttcggtttctggttcatacaagtgatagagtgtttcgtgcatttccttgacactgcgaaacggacgctcgactttacctttagacctagcagtaactcgtcgtccatcttttccttgtggcaagtgggtacgtatctctactcccaaataacccatgactttttgaaagaccaagcttttggctatgggcccattatccatgtacagcatttggggaatgccttggaatggaaattcggaatgcggcttgggtgacatggcagcaaacataaatcgtagtgctgcttctacatcttcaccatagacaccgtgatattcctggtaagtcacaccactgcggtcatctacgacactatagagcatcagcaagggatgtccccgccctaattccatccaaatcggggctttaacgtgtttgaggtcggattggctgaggtcaaagtgccaacattggttactttcttcggcttgaaagcggacggcgggtggttgtcgtctcagggtattgtggtcatagccccattgtttgaggtaacgattgactgtagttggtttcagtaaccccggtggagcttgaacatgaccatcggcagtttgaattccgtgttcttctaacaagcgaatcgcttcagatgtagacaggtgatgccctttgcggttggatgtacgtatttttaatgccgcaattacttcacagtaacgctctaaactggttctagggatgacacgcggtatgccacaatcaactcggcgcaatgaccgcaactgtgttcctggctttaatgctcgatataccgtatcaacagagacaccgtatagctgtgctatttcctcaatcagagcgcgacgctcactactgcgcggtggcagtaggtctaggcggcgacgtaaatctactattgtttctggcggtatccgtctacttggcataatccacctctaccatttaggagcgatgtggatgtagatgccgtttctctaaccagtcgtacagtgttgagggagaacaatccacaagtttggctatggagcgtttgctgatgccaagggatagatagttgcgaatctccgcttctttggcatccaattttagtcgtgctgattgccgtccttttggtcttcccagtggtttaccttcaactttacgtttggctagtgcttcggttgttctcagggcaattaattctcgttcaatttctgcggctaaacccaagactgtggctgtaatccgactctgcatggaaccgtctaataccatgccttgtttggcaatatggacgttaattgagcgacgtacacaacattccagcatttccagcacttgcagtgtggaacgtgccatccggctgacttcggaaaaaatgactacatcagatgctgttgcggtttcagtaatgagcttgcctacttcccgtgattgccatttctcccttccagaaacagtatcctctacaaattggattgggcttaaagagtgtatattggcatactccaagatgccatgccgttgattgttgaggtcttggtgatcacttgagacccgcaagtaagcataaataaccataagaagaggagaaacagggcagggctgtttcattccctaagaagcttgaaaaatcaagggttatagcaaaataaaattgatgattttgctacctgcgtatcgagaaaatagacaatcgcactgttatttatgtgctgaatattctgtttcatcgttacccatacttatgatttttatcgctaaccatcttgacaaatcctgtttgagagggaacgaaacagccctggagaaacagggggagttccgctttaaaccgcaatcaatatttttctggacggtattagtttaaattaaaccacaaaaaatgaatatatgtgttcgatttaattcctcgtttaatttgaacatttttaaacaacaatcccctcaaactggctctagatacaagttatagcctagttgcatttattgtggtttcagaatgcttgtttgcagtttcgttgcgattattgtggtttgggccgcaattattgtggttttgagaccacctctagttgcaatttattgtggtttcaaatttgccttgattgcagttttgatgatttatgtttgcagttcgccacactatacgctgctaatgcctgattagcgatcacattgtctatgctttgagatttcatgttatgatgtctcgaaattttatagggatttcggacaactccttgcacgacgaccgcaggattagctattatataagtgcgatcgcggttccgaaaagtcttacaggacattttcagttcggagttacccgcgttatgacaagacaattaatgaaaatccagtctccactggtacgcatcccctctagctcccactagtggggatttgtgtatgagagacactaaatctgttgattgtttatgccttcccatctcatactgttttgaattgctaattcctcacccaattgttctaagcactcgtttatgtcgtctagtcgtgctgtgatgtccagttggtcagtgttagtcatactacttcttgctcgattttttttcgtggtctgttactgcttgctgggcgattagttcgaccaagtttgatagcgttcggttttcgctgtccgcccattcttgtagtttttcttttaactcaggactgcatgtaaaagttacttttgccttagacgttgccattaattagaaaagttctgatatattatgacactttcagttaacatcaaaacttgtcaaaaagcatttggttctaaacagttctgattttagttgacaggttcagaacttacctactagtatagtagtgtcaaggttatcgatacgtcaataacttaaggcagacgcagtaagacccaagcgcaaaaagctaaggcaggcgaattccttttgagggttgcaagatttacgagtgctgttttttgacagcattcaactattcacagcaatatctgcattgcgtccgttttataactgcggtcgcggtaattgtgcgtgtctgcatcatgacagaggattcatgtacatcaatttgagcaatttagaagcaatccgtgaactaccaaacaaaggagaaataatgctgacatctaatcagattaggcgtttacaaactacagaatgttggctcagagaaattcaatcttcagaagaatttaggcaattaaaatactatccagacgtaacacttggtgatgcgattcaagcaataagtgaattacttgatgaacacaacatacagttgagtttgttctaaatcggagtaacaaatatttgacaacgcagtgccatgactgcatcaaataggtgattcgagggcgtatacacaggggtaaatcaaaaagtgtcagtatgtcacgaaagctgacaagctctgttattacgtggttatagccgacaaagccaagactataacatttgtctaaagtcaaaaatccaaggttattgatagtgcctagctaatttagcgtatcagataactgtttctatctaatttagtcggtcaaataacctgaatttccggatagtcggtcaattttatacacacttaagtaatcaaacagaatcaatgtggcaacaaaacaatatctagctaagtatcgccatctcaaacagacttacgaacgcatcacagaaaaagacatttcagatatcacttggtatcgcatagttgcatccttaaaacaatatttctcgctggaaattgaatctttacaagctaaaaatattgttgaaacctatgcaggaatgaagcgcaagtgtccagccttttcttttagaacatctgattttaactctcgctggcaagcctttaaacacttctatgatgcacagttagttcaatacacaggtcagcaattcctgagagtgcttgcagactatctaaaaatcaacctctcagacgtaccgcgcagcactcgttactactggtttagtcaagccggactatcttttaacgcacttaatatttaccacagcaaagatttagcccttgtcgcgttcgtcgctgcgaagtgggcaatcaaccgacgagcgcaaccaatgaaatctgctgaaccaaaggttttaacactagctaaataaggagcaatcaccatgtctgacaagtttactaataacgtccgcgctcgcttgtacaaacagggttatcaaggatttaccaaggacgattacactcaagccgccctcgctgttgagtgcgatgacctcaacaatcccaccaaagaacaattgagccaagctgttgactatctcaaacttcaaggggcgataagccaattatcagtagctgatgaacccgttgaagaaaaatttctcacccaagtagaggccgaaactgaacttgaaacagggacacttgcagtggcccctcaagatgtaggcgagatgatcacgaagggagcctcacaaatgggtgtaatcctttcagagcaacaaatcaatgacatagccgatagcgttgacacctcagccagcacctttgacgaaattattgaacaggtagaagcagcactacttgcttatgctgacttttcagcaaatcaggttgatgcaaagattgaccagactttgaccagagtacaagagcgagtagttaatcgtcatgagcaaagcagagacaagctatctcgtgggctaacgggcattagtggggctttggagaatagccgtaatcaaactaaaagccaactttccgggatactcaccagactcagcgcggctcaatagtgatgacttaacactgtttgagtgcttggtaattcgttggtcaaagatgaattacttctccagaattgctgttagtttaggtgcgattgctgctttcattttgcccttacattactgggtatacctgccaataacagagcattctaactatcagcaatatctcaaacgtaagtcagctattgagcaatatgtaaaacgaatggagtatcactgccacaaaatatttacacccgaaaaagagtatcgctgtgaaaaattcaatgaagctcaagaatcagataacttccaaatctcgccacctggaaagccaattaaaaaataagttcaacgtatccactaacttagtagtcagagcattaacaggtgataaatcagccctgaagcttataggacaaatgggtaatgacggggcaaagattagcgaattcgccccacaagtaagagagcaaatgttagctgctatcaaaggcactgaggacttaaatctagtcctgggtgatatttataaacaggctggtgtaagcggcgaaaaaattgaaagagcagtgcagtcagcaattttagctgacactcatttagcgaacatcctagaagagatgaagcttgatttcgcttcgtcccaggataaagaaacgctacgtcatcaacaagcgacagaccacatcaagctgaaagcatgggtcgataaacacatgatgcaagttgatggtgaatataagatgttacagaccgaattacagacagacattagacagcaaacaattgacctgcaacatgataaagaactgggcaagtattacttagaaatgggtgataacgctcgtgatgattttaagccgaagaagcaatatgctcttcgttcaattgtccaaaaaatcaaggatgccctgataggcttttgacagttcaagcccgacagccagcgcataaagttactgtcgggcaagtaaatatcttggtgttaacatgacatacgacatcgaagatgaccaagaggaattagtcagcgaaatcgcgccagatacgccattacccaaagatttaatagaacatctccaatcgcgtaagcagcaccgtaaagatgttatcaatacaactgataaattgacccgattctttgttacttggtcgctaaattctacaggattatttatagctaaatatctattaataactggcggtggcgttaacttgtggctggcaattacgctctcgttttctatatgcagtgttggctctctggctgggctaacgggcttgagagttaattacaacagtgacggactagaggtagataatatgcaaaatatttttaaaactgctggtggtttggtgtttgcaggtgtcaccacttggttagcagttaaagactatcaatattttgagaatttgactaaagaaacagtgagtcagattaaccaagatatccaaactattgaaaaacagaatccacaatcagacccttggctaagtattgccgtcgcgttggctttattcattggttccattgcaattatttttaggggacgagaatgaaacaaggtgttttcgagttaacgctggctggtgtgtgtggtgtagccgcaatcatcgggctggcaacatcgcaaacacgacagccctacgatttgacacagattcagttctgcccaaggtcaattaatggtgtagaaagtcaagtagcactggataagcgtttttgtaaccagccgcgttttgtcctgactgaagaatggcgacgctacgggctgtatggcagtatcattccctacaaaggtgatgcaattcaatgggtg

SEQ ID NO: 892 - DNA, 24418 bp, Nostoc sp.
  source 1..24418: mol_type = other DNA
acaagtttatcgcggtttaatgtaatttaaagtttggttttgccgcagtttaaagtttgattttgccaccacattgtctgaaatcccggtaactcagttccacaaatatcctaagataagcagtttttaaagcctgagtttgccgatatagcaattttaaagtttgacattgccgaaatagtctggacttgttatggtgtttttataggtaaaattgtactaatttcagaggagataaccatgctctatgatgtcgattttcaagcatggtgtaatagtttgccgctctcccaacaacaaagagatttggttaaccaaattagaacttcccctcctgctcgtaaagtcaaaggaggaggaagaaacgttcatggcccctatgctagctcaaagatgggtagaacgattcaatttgagtctcatactgttgaattaccagctatgactcaattttatgaatatgacgaccaagttttagaatattgggatcaaccgattaaattcagtattaaatgctcaccacaaggtaaacaagccacaactatcagtcattatcccgatttttttgtaatgagaaagaattgttgtggttttgaagagtggaaaacagagaaaagactggaaaaacttagtgaggaacagccttatcgctatcaaaaaatagaaaaacaatgggtggatgtcattgttcaggaatatatcgaaagcttaggatattattatcgtcttcgctctgatagtgaaattgattgggtcaaatatcgcaatcagaaatatttacaaccctacaaacaaggatatttaaagcaacaatatatccttaatgaccaagtagaagccaatgttcaagagattatcgttaattatcccggtattaacctcaccaatctgtttgagaaggcgaaaaatgccactattgatgatattaataccttaattgccctcgaaaaagtctatgtgaatttaagcgaagtagctttagtggagcaagagaaagttcatctattccgtgatcaagctacagccgaagcttatatcacggccactcacgattattgtgaacctgtatccagcaatgtgccgatcgttgaacttaaagtggggtcatcatttttgttagatggaaaaagcctcaccattgaccatattggggaaagtaaaatcatttttagaggagaacaaggaattattcgctggacttatgcagaatttcaacaattaatcgaattaggagaaattagtaatcttcagacagaaaaccacacaactttagatgaggaaggatggcaatactttctagaggccagtcctaaagccttagaaactgcaaattatcgttatgcagctattaagcattttttaggaaaagaagctgataattctcaaaaatacgatttatcagaacgaactctacgcgactggagagcaaaatatcgaaaagcccaacaaaaatacggatgtgggtttattggcttgattccccaatataaaggcaatccaaccccccgttattctgatgaagacttagaatttattgatacagtgattgaagaacaatatgaaacttctaaacaaaaaaatgtttggcagacgtatgaatttttaaaggatgaatggcagaaagtgggacgaatttctcctgttcccagtcataccttttattacgagagagtgaaaaaacgaaacagctatcaacaaactaaaaaacgaatgggatctcgtgcagcaaataatctgttggggccttggttaattcaacctaccactccccgtcatggagatcgcccgctcgaaattgttcatattgaccatacacagcttgatgttgagtgtatatgcccctatagtggcaaaaatttaggcagaccttgggtaacaggcatgattgatgcctatagtcggaggattttagctttataccttacctttgataatccgagctaccgttcttgtatgatggctattcgcatctgtgtacaacggtttggacgatttcctgaatggattgttgtggataacggaaaagagtttagttctacttattttgagacattgttagcgcgttttgaagccagcaaaaagcatcgtcccaaggatttccctaaatttagttcaattattgaacgttggtttggctcacaaaatactgaatttattaataatttgagggggaatacccaaatcatgaagcacgtccgcctcgttaaaaaagcaaataatcccaagagtttagctgtctggaatttagaagaattatacgattatttggcatttggttatgcttatggagtttatgataaagcagaacatcctgctttagaaggaatgtcacctcaaaaggcttttgaattagggttagctaaaacgggacatcgccctcatcaatatattaaatatgatgagcaattcaagattttaactttaccgacgaacaataaaggaatggccaaagttattcctggtcaaggaattagagtcaactatcaaaattattggacagatgaattttacagtgttgagaatcaatgtattcccgttcgctatgacccactagattatggtgttacttatgcctatgttaataatcattgggtaaagtgtttatctaattattatatgaagtttcaaggacattcagagaaggcagtagcaatagccacaacaatttgcagacgaaaacggcaaatctataatcaaagtcaatatgtaggttctaaagagattgtggacttacttaataatgcggaagagcatgaagaattaatactacaaattcgtcgagatcaatctgctaaattagttttcaatttaattgaaggaaaactgagtagtgcggtattattaaatacattaaatactgaacaacattcatatcaagatagtcaagcaatagaaaaaaatctagatttaatagatttaaaagaggagagtttacagcctagtctacccaaaaaatttaatcctgatgacattaaggcttttgctgaagaggaattgtggtaatggttacaaatcgtcgtttccctcaagaatttttacaagcaccaactgataataaacttaagtattttaaagatataattgttcctcatcgcaatattaaactggttctagaccagctactaaaaaatgctatagaaccggatgatgctttagtttatctagtatttggggtaacaggggtaggaaaatcacggttaaaagcagaatttgaaaaacgattgcttaaacattttgcagacgaaattatttctaatccaggaagtttagtggtaggaggaatcgaggtagatggtgctgaagcaggaaagtttaactattctaactactatattcaagttttggaatctttgaaggaagttttaattgattataaagaaaattatggagttgatttagaggatgacaactcagataacctaataggagatcatgaaggaagaaactctaaagctttgcgtcgaacaatacaaaaggtttttctacaccgtcaattaaaagcttataccttagatgaagcacagcacttatttgatgttgcgggaggaagacaaataaatgttcaaatgaactggcttaagtcactggctaataaaactcaaacagttcatattttatttggaacttatgaacttttaaaatgtcaagaagtcaatggtcaagtgggaagaagaagtgaagattattatttacctccctactatctgactaaaccggaagatcaacaagaatttattaaagtaattaagactttacaacagtatttgccagttgaaaatgaaccccaattagaggaacattgggaatattttatgaaatactcgatagggtgtgtgggcattcttaaaagttggtggtatcgcgctctcaaaaatgcgttagatgagggggctaaaacagtgaggatgaaagattttaaagcgagggaattatcagcaggaagacgaagaacaattcaagaagagttaaaagcaggagaaagccgtttagctaatctatatacgaacgagcaaaaagatgaaaatcctgaatttaccaattctcaaccagagaaaaaaggtagcaaagttggggaacgtaaggtaggaagagacttagtaggagttaatcaagagggatgagtatttatgaggagatttggagtccaaaatctctagaaatcccgcaacggagtcgcttattttgtcttgaacctgtggcggtgggaactccctacacagaaagtcttagtagttatctccatcgtttagcccaggcgcattgtttaacctctcaaaagctcgttatgggagaaattgcgccacttatcctcaaagatgaggataaatctgagctattggtaaaaaatctgagtcacttattgggaaatagcgacgcgaaaccagctatcaacggaatgcgagaaatgacaggaaagttagtcactgtcttagaagagttaacaatgcgtcgggatttacgctttttgacccttttaagctggaaaggaatgatttatgacaaggggttatttcggaactatcgcgcttggtgtccttgttgttggcaagagtggatgcaggagaacaaaactatctatgaaccattattatggtcatttaagaatgtggaattttgtttgattcacaaacagcgattagtagaagaatgtcctcgttgtggttcgcgtttacctatgattgctaagttttcacctgcgggattttgttctcgttgttacgggtggttaggacaggaaattaaaggcgaggcagaaatagagaaatatagagttaatattcaaggaattagcgaattaattgcacttactccccaattaggatataaacccatcccaatcgagttaacccgaaaattacaattaattttgttagtgtttgaacaagcaattggcaaggatgtgaagttattgggagatttagggggagttatggagtcgttgagaatagcttcaacaagaaatcaaagtcaaccttatcatttggtgaagttgattattcctgtgtgtgagaaggcgaagattagtgtatcccagttgtttgggtcagattttcaggaattgggcaagacattgttcggtaattttagtttggaattaaagttgtaaattcatttagactgtgtgtttaataccccataacttaaatcatttgctgaattaaaaaatactggttgggttattggctaataaatattgcaggagtatgccacttaaactgttagccaataccttcgcttggaatgaaactcagggcttgctcaattgatttcagagctgattgaatatctgcactcagtgcatctgcctcagctttaattacagatacacccttctcgatttccgtcagagattttttgatagttctaatacgccccaaagctgtgcgaatttgttcaagctgctgttcaataacagtcacatctatctttgactgataagtacgcagttgattcactcgttgttgaatgactagaaaccgaatcgcaacaatcaaaaatggctgagttgtagcaatccagtaaccagcttcagtcacaccctctgcccaatcaccaatttcctgtgctagtccctcacgggaataacttaaaaaaattgctgcatttgcagaacgccgcagcatcgcctgctgtaagtgttgagcaattgcttggcgaccaaacggcttggaaggtctgtttctcgcttcaattacaattgatagttctattgccgctagggatttgctagtgaacttgacgagaatatcacctgtatccttatcgttaccaatatgctctacctctatgccattagactttgaccaagtttgttgtaattcaccaacaactaattcttcatagctaataccttttgctgttgtctgttgaagtacctgttgtgtcacctgggtgtcgtggatttctagagtcagtttttccacctgttcaatcaagggtttgatagactcagcaactacatttctcactgtcactgccaaagtaccgttttcagtagtgacatttgctaatgctgctttgaatgccccttgaatagaatctgagcgtttggcatctaataaatgacgtaatgtttgaaggaagcgaccaacaacagaggtttccttggcagggtcgatgtcctgtgtcagcaaagtgctgacgctattgagtttctctgtgagaatagctgaagtttgactaatttgggattgcagtggggctaataattgaccattatctgtgccaatctgactaaccaattcttgctggaaagattcagcaatcactttgacagcttggtgaaactccaccaataaagattccatctgctgcttgactaattcgttgccgttacgagcttgagtagtttgcaagcagagaaatcccaactcaaaggcatcgagacaaatatcttcatattctgactggggaaattgtttgaggtagctgatggcattctgaagcgggagagccatgcgagaaatcaggacatgattctctgtgatttcaatactaaagggcagatagtaagagtcctgagtggcgcggttcatgaatcagttggttgctggtgacgataacaagcaccctactatctgctttttggcttggtcaaggagatagagaaaagttttgtcaatttgcaaaaactggctgattaatttggcggttgagactgatgccactgttccaacagaggttgaatgacctccgtgttggcaagtaaaaagtcagcgacagccataattctctggtaaggtaatccagcagcacggcgactggcttgtccacctagccaatgataggtggtggattttgagatggagcagattttggctagttcttcataacctaatccccaacggtagctaaagttttggggggagatgaacatttggttgtgcagttctagcaatttctgtgatttttgagtttcagacataattgcccctaagctgttctaaggatgactggtctagggattcgatatcttcctcaaaggcgaagtcgcaggtacagatttcatgggaggggctacgttcatctaaaagaaccaagtagtgtaacccagtgagaatgcaactggcttggtgggtatagataactccaatgatgcaaccaaagtcgccattgggtacttgccaccatcgtacccactcacctagttggaatctctgttggggtaagactggagggattcgctctggcaaggctacaggcggtattgaaaggggtatctcaggcataaatgtttttgttaattattccctaatgttatttatacactacaaaagtttatttataatctatagacaagtttcctgcactttctgaagattgtgcagtgagtgaaaataatgaactagacatcaaacaacgctttggcaaagcagttaggcggcgtagacgtgaactggatttgtcgcaagaacagcttgcagaacaggctgggcttcaccgtacttacatttcaaacctggaacgaggtgaactaaatccttcgctggaaaccattgaaaagctggcaaatgctctaaacatatctattcctgcgttgtttattaattacagcgttcaggtagagcatcaacaacacaaagattcttgacttcttgaaattgtaatgtttatctaagccattaaagagccgtgacagttgagtagaaagattgattactaaaaagagatttcaattattaaataatgtccatttttgtcagatgtcaaggggttcatgattattgcgaatgatatttagcatcatatgtaatcaagagtaaagaaatcacaagattatttaaataaagcaaaataatttttataaggcaacattattataagcagattttctccagtttctaccattattaatgcttgagagggctttaggtgttttgaatcggtttgctgtagttgattcttctatagacaagttacctattgtttgccctaatctaagttttagttcatcaatcaaagctgatgattttaatccagaagttgaagaattattcaaaaattcttcagtttcattgattaatgtagctaacagccaagctctagcaatggaatatggctgttgaccccgttcttctatataatctgtactaaggaaataatcgaagcagtcaagtagagtttgtgagtcatccaaagaaacatggaacgcatttagtagagcttcaatctttcgataaataagtggttctatttcatttacttgttcgctccaacgttctggtactcgataagtttcttgtagagcatctatcctatcaccaatatttagtcctgcctttggctttaataatcctatttgtgtagggagattttgacttttgaggctaacttctaaataagtttgattccacaatccaggttctcgatataagctaaatatatcttctagtctacgtctagtaccaagactaattcttttgcaggtcaaagggtcagttgttgtttttattctttgattacagagaagacaactaggaactaaattataaggatgacaagctagatgtggatatttacttttaggtagatagtggtcgatgtctgttttaatatctcctgcttttgtactgtatttggtttcatcacaagcaggacaaatagataatctggaatttttgacttgaaatgctgttaaaaagtcttgcgctccaaagctagagggattatccccggaaaatatatattctggaaaaccaggggttttttttcttggactagcagcttctcgtaaaacgttttcgtagaacccaattaaaaaatcagatgctgcttcttgccaagaagttatggtttgaggatcgagaggttcaatgataccactaggttttttaagaagtcgaaatgcttcacaagcaagttgctttacccatttgcgtttctcgttactaggagtagaatcttgtgcaaaaatttgaagaggtttgagtctgctttctgctgcttgccatatccatttagctattttgtctcctcttccacggaatctgtgacaccgatttaagcgatcgccgcagttagtttggtctaaagtggagttagaagctgcgtaaaataacagccagatttgtaaaactacaacatccgtcagtcggtcacgggttaagtctggtaaatgaacatcatgaatcattctggctctatttctagcaactcccgacgtattttataactccaataaccctgagcaaccactaagagcaaattttccaaagtttgtcgtcgttcttccaggtttccattagttgcttctaatagtatgcgctgaatgtatgagacacttctttgaccagcaggatgtggcgcattaaaaacatgaaccatgatatcacttgggtctgccgcaaaggttttgaggtcaggtggtttggcgttgttagtataacttgcaggacgcttgaggatgacaatatcttcttctaacacatccgtgagggtaatactagagtgtgttgtaattaaaacgtggctctgtctttgttcgagagttttatctaagagagaaacaattttacgtttccagaaatcgttgaagtgaacttctggttcatctaataaaatcaaagcttcagtttcacctaatagtgtaaacaagcacattcgagccaaaaagctacgctcaccgtcacttaaccagtcaagcaaaagtaaaggtgggtcatcctgttcttcatgatcatcactatccgaactagaacgctctaaaaaaatattgacttcccttaacacggactgaccatcatcaccgattttacctaatggacataagattctaaaaagttgtagaccactggaaaattcttgaattattgtctgggctgtagaatttcctgaagttgtcaggtcaaatactagtagatagtcactacctaagcgtaatttacgcgttgcaaagtttgccagacgttctacctcatttctgtctgcttggcttgttgtaccttgagtcaaccgaaacttcagagaaaaacctgcaatcgcctttatattcgcgcccttatcagtatttttcttcgttccttgcagtacttcttctaaacgcctattttctgggttttgagctatgtcggctaataacccgcaaagagtcacaagcgaaagttgatgagcttcaataaataggaattgactttcttcttctggttggaaattttctaaggtatcaagacgaagtggtttaccgggtatttctcctattgctcggtcaagtaaagataattcttgtattgcgtctaaatatccaccactaagaggctgaatttcatcaagttttttccaagctgtttcgctacctgtcgtaaaagcaacaactatttctggtaaaacactacggctaagttgcacttctgtgttgtcttcccaaaccttcagttctccaagaggtaaaatttcctcagtgtctaagtctgcaaattctgtttcttctggaaagttggaaagcttgatgtaacgtttagtgtctgtttctcccaattcatactctaattcaaaaccgtactcaatgggagcatgacgctctagctttcgcattagatcaaataatacccgcaatacagttgacttgccagtaccattgacaccgactaagaaatctaggctgtaagaaggggggtgagttaaaaagttttctgttcgtggactaaaatcaatttctagattccgtagaacctgataactttccaggtaaagtcgatgtaatttcatctgctttcctcccctgaatttaatgtgcctgagtctaaatcccatacatctcgttgggtaacgcgacgatagaacaggaggggttcattagtttttgggtctgctatggttacaggcactataacccccatacgttctaaaaggtcaatagttgagcgagtaacatctgttgtttcatttacatcaggattacttaattcctcaagggtaaatagtgctgctgtatgataattatttatttcattatcagtcactatctctgttttttcacatactttccgccaaattttcctttgttcttggcttaaattaccaaaaggttgaatttctgcttgcaggggagaaggtaattgttgggttgttattggtggtgactctaaatgaccaaaaagattatcaatacgttgggctaattgtcgttgattgcgataaatttttgctaaaagggctgtgggagattcaatagtatttgattcagtttgagttctaatataggtttctggacgcaggtcataagcttgttcttgtattgcagatttggcaacagatgcccctagcagttttacctgatttagaccagcgatttctttttgtggcgagaaggaaatggctacagctttgacaggatgcgaaagtaactgaattacttgcttggctttttcttctgcttttaattcttctatatctatatcggtttctgtttcttcctcagtttctaattgttcgttattatcagaattatttaagaaatctaagggtatctgcaagttgattcgctgatgcggaggatctgcgcccacttccaccagtaaaagaggagattcttgacctgtttgagaatcgaaaggttgatatttaatattttctaggttatttcctataccttgacaaattacacctatacaaatttcatcatttgttacccatttaataccaagttgtgggttagtttcatcaggcaataaagtatcaaaatcagagttatattttgtccagactgcttctaaaaaaggtaaatcactaggttgagaaggctcttgagttaaatcgcgtcctctacctgccggataaccatcttgttcgacttgaaaaaaccaagttaggtgttgttctgagggttctactttgctaaatagcagcaaatgagtttgcagaggactatagggttgaaaagcgtcttttggaaaagaaactactgcttcaagaaaattttcattaactaattgatgacgcagatttttctcggctgtactactactgaacaaaactccagatggagctaaaactcctgcacgtccattgaaagataatttttgcaatgctagattgaagagtacagtttcactacgactgccaattttttgttttgagtttgtttctgctaacttagcatcaattttttccccaaaagggggattcattaaaatcctatcaattgctaaattatagatttcgccttgtttattaaatgtttgtagcgcgttttcattgagaatgatagtatttttaaatccatgcagtttaacattagcaaaagcaattcttgcccattctgaagatatatcaatacctaaagtcatcgaagacacataatttactaataatccaccactaccacaagcaaaatctgctacgttatgggttgactcaacttgggcaagagaaatcatgcttttagcaatatgtctaggtgtagggtagcctccacctgcaagcatattaggtaaagaaaatatgatatgacggtctaagagttttgcatatcctcctgctgtgtttgctgcttcagtgaggagttgtttaattttttctgtatttaaatttggatgatttggctttcttggctgtaatgtttcgtcaggaaattttagttcgttaatttcaagtagaaatgcagcgatatgctcaataatcgcaaggtcataagaaattcctactttgcgaaattccgaccataattgatttagcaaatcgcggactgtttgcatattttacaattctccccgaaaagctcgctctaaaattgattgttcaagtaaatcaaataatttggcatcttgctttaaaccttttaatatttcatcaacttcatgctggatatggtctaggtaggtaactgcttggcgttgttgattgataggtggtaacggtactgaaatttccacgacatttttaggatatatatgcgtttgccctcgtttatcggcaaaagcaataccggttcttctagacaaaatttgtcgttgaccttgttcagaccatagataatagtagagccacttacctaataattttgacttattcttggaacgaagaatcataatttgtgtatcaactgtccaaaaattctcacattcttgaacgtagcttacacgccctagtgtcccttctgctatgtttgccatcaatacatcatctggttggatatatctatcttgaggcatttttgttacttgttcagatttcatataagaaggattatttaagcgcaaatagtgaggatagacgtgtttagttttaaatactctaatattggaatgaccctcaccgcttgcacgaccattaaatgctgtagctacttccgataaaggtaaaattttaataacagatttaagatttgtaaatacttcatcgagtgcgatagataataatcgctctgcatcctgacgagttgtattaatcaggttgcgagagtctttaacttcatctagtagtgtttctatacgtgcaacaattctacgctgaatttctaatgaataagtaggctgatctactaatggtataggtataggaagtgcatgaacgtcatctctgcctaaacctggtatagcagcagatctgttcagcttatccaaaccaattatttttagatagaaatataaatactttggataaatgtgtaaagaaaaattatctacataataagtagtatctataggccaacaagggctttcagaaaagaagactgctccaatagaacctttacgcccaataattattgtaggcgattttgtaaggggtttattatgtaaacctatttgacctcctgaaccaaaaacaggataatttccgcttgatattcttttactagctggtagggatttaccatactcaagctttaggaaatctcctatttttatccaactccatttctctggtagtctccacaaagatttaattgattttgctactatcatcttaagtatcacgcctcctcttgcccacttacaagtttatgaaggcgttctatcttctcatgaagtttcttttgattttcaagaattctagcagtcaattctgatggatgcggtaaattttcaatctccaagcgatgaggatttctagctgataaatcatattcacgttcaaccagattttctctatctacaaaccaactattattagtaaattcctcttgggtaacttttgccagacgatacgcaagtaatttttgaaaaacttgccttgtttcagcaaaatgttcatctgtaatggggttatttttactaaatttcttcaatttttcaggtagtggcatttcataataaagcacttcttttgtagcacgggaacgctcaaaaaataacagtgctgtttttacatcagaataaggtgcaaaagctccaggcggtaaactcactactaaaaataagctaaaatcattcagcagcatttgcttaactgttgcaaaagctccactcctgaaaagtgttcctgctggcacgaccataccacaacgtgctttacttgataattttagttttttgataatatgttcaactgctaacagttctgtagcattactttttacaggaaaattctcttgaatttgagcattttctttgcctccaaatggaggatttgttaaaacgatatcaaaccgctctgagacattttttaaattttctgccagggtgttgcgtcggcgtatatcgggaactctaaccccatgcaataccatattcatagtaccaagcaaggcaggtagtgcttttttctcctgccctacaaaagtgtcatattgaagaattttgtggtctttagttgttttctcctgtttttgcatatgtaaatatgcttctaccaaaaaaccacaggaaccacaaaaagggtcataaacagtctccccaatttgagggtcaattacctctaccataaaacgaataattgaacggggtgtgtaaaattcccctgccattttattttcgcttcctagtcgctttagtaagtcctcataaatatgggaaacagtatgaatatcatcagcatttttaaagtcaatactatcgacaatttccagcacatctttaaggttatagggtgaagcgcaaacgattacagtgcgatcgctgaaaatcccagcaataacctcacgttccgatgaaccatatagactagctaaataagatatcagttctccccgcacaaactgcattaacttttcgccatcccattctggcgtggagcgacgaccattctctcctattttttgacctaaagccttgggtatccagctagaccagcgataaggctcatcaataactcgcttataagttctacctgctagttcggcttctacttcaaaaattgcttcctgctcatcaaaaaatttcaagaacaacagccaagataaatgttcgacatactccatgacaccaccacagttgtcgtcgcggcgtaatatgtcacaagctcgccaaatgtcattcgttagttgttctctactcacccagtttcctcttgataaaggcgactttgcacctcatttaatgtttgtcgcagatggttaattgtaccaaaacgctgaacaattcctggagcctgccccatttcccgaaaaggagaaagccggaatacttgattaaacatttcttgtacacctgccaagcgatatttgtcgagcaaagctaagataacttcacgcgcttctggggttcgctcttcaagaaatcgttgttcatagtttagaaatgcttcaactcgctcatccctggtatgaactggcttgttaaaggcgagatgtgctagtaagtcaaattggtctgctttaggttgagataaaacctctgctaatacctctatgtgtatgcttgctgcttccagttcttccaaaaaagcttctctttggttggcatctgtccaaatttcatagagttgactccacttaggcacataccctacaacttttgccttcgtgtaatctaaatattgttccaaagttaactgttcacccgtagactctaccagaaaagttgcttcatcagcgatagtgacttccaaaccccgaacgctaattttaccaataggtgcttcttgtggtttcagctcaatgacaactgtttgagttatatcttgttctgtttcaactgtgactgttcgaggacggaacttagtaccagttacagacaagcgaagtgttcctgctggcagatgctcaaagcggaagtacccgtcatcgttagtgcggagtgggccaagttgttgattagcaccaattaacacagtcacagcagcaccgactattaagtcgcctataacagcatgaagaacagttccttccaaaatacttgttcttgggcctgtaatttcagtagttggtacttcaggtggacgatcccactcatcaaacagtcgggaagcacctacatagtcgataatgcgaaaccactccttgccagtcgtagaatcaacccgtgaacctcgaccaatgatttgcttgaagagaattggtgaagaaattggtttcataaatacgatattccggcacgagggaacatcaacacctgtacttaaaagttcagcagtagtagcaacaactggtgttctgcgatcgctatcttgaaactgttctaaccaggtactggcttctccttcctcagcaataattggtactgcatagtctgaataaccaagactagaaaattcattttgcaggagacgagcaaccaatctggcatggctcatatctacgcagaagaccattgttttatcgatcgctccaaagcgattgagcaaccctgctagatgtttcaccatagtttcagtgcgatcgggcaaggtaatttctcgctcaaactgtggcgttaaataagtatcgcgcaacctggaattttcaggtacatagatttctgctccctgaacttgtgcatcttctacatgaagtccatccttatcaacactggtacgaactttatgcaccttataagttgccagaaaaccatcttcaatcccttgacctaagctgtaactgtaagcaggtggttgccaatttccttttgatggatcatcataatcaaggggaatttctggttcctcacagcaaaaataagcataagtatcaatactttcactttgtttgggcgttgctgtcatgcccaattgaattgcacctgaaaaatgctgaaggatagcattccatttcccaaaaccagaacgatgacattcatcgatgataattaatccgaaaaagtcaggcggaatacttttgaataaagccttgccattgtcttctgcatccagtgcttgataaagggcaaagtacaaatcacggttgtaattaaacttgcctcccctaattattccgcgtggatcagcttgtgtattagcaaagggagaaaaagcattataggcttggttacgtagcggaatacggtcagcgatgaagagaataggttttttcagccaacctgattttctaagtttccatacaatttgaaaagctgtgaaagttttaccagttcccgttgccattgttaacaaaatacgcttttgagaagttatcattcgctcaatgactcggcgaatagctacttcttgaaaatagcgcggttctttaccacaaatagcagcagagcagaaggggtgaagtagggggttgttttgctgaagtggtttagttatgtaagtgccttttacatcagccactcggttacttgtgagcgcaactttcttcctgcggtaattctcccaacgattccataactgttccggtgctggaaaagacgacaattcacaactctgatttgagaagaaatcaaactctacaaatccatgtccattactagaataagcaaaaggaacatccaacattttggcataggactttgcctgctccaagccagcatctaccgctttcgtctcatcctttgcttccaatacagcaatcatctgccctttgtaacgcagcaggtaatctactcgccaaggttgacggcgacgtgattcttctcctatcaagtaaattctgccagaagtaacagcctctccctttacgaaatagtgttcacgttcaatttgagtttcaccccaaccagataatttaatttggggatctatcagctttgcccgtgtgtccgcttcgttataaggagccaaacttttagcctctctggctggtttactctatatgccatcagtaaagaaagactagagatacctcttacctacactgaagtagaggtaactataatttcatctatatacttaattttattggtaaacctagagacggtcaattaataccaggtatttcaacttgcggtcaattattgcttgttgatgggtttttctgctgtgatcacccgtataaataagaatcagaatttcagagtctgtcttttcctttaagtcacagagttgtccattatcttcttccaaagttgtccaatttcttcttcaagtcacaccacgaatcaccttacacttatttttcccgacatcgggaatctaggaattgagcaacgcctaacggcaataagccacgaatcatccagtattgcgggagggtgattcttatccccaaaatttgagcaacgcctaacggcaataagccacgaatcatagcaaaggtgaaaacccttaactgaggaaggctcatttacaatcttacaagtaccttccagatcgagaaaccaaaaacacaaaatttaccaaagttacccttactttcagcccctcaaacccagtgccgataaactgtcccaaaaatggcaagcacctttttgcttgcctaaattactatatcccttaccgtgtaaaccttcccgccattctttgaccctaaattccctttcccataagagatacttgtcaaattggagattgaatcatcgtccacgccaaatcaggaggtggagagcttggcatttcctcaatccgatacctcaaaaatcgggtatttcttgaccccacatggtcaacccaatagggtaaggttaacctgcctcgattatccttaatcgcccactgtctcaccccctctagataatcttgggagacaagtttaatcgttttaatcaactggtcactttcacctaaaaataaacaaccaaaccgtcttactagctcaggatggtcaaacgctaactgtattctctcccttaaacttggttttatcttctccccgtcagaacgaatccaaatcaaacacttcagattagacaaaacttcttgataacagggaataacattctctggattactaaaatcagcattcttaaaccgtctcatttgacgcaaaatccgcgactttttggggctagataacattgcgatcgccaattctaccccacagtggcgatagacatccgtttcccctaccaaagacaacaacatcccatacactgttgctggaggagggacaggataggtttttcccatttcccttgcatgggactcccgaaaagtcgcaaatggaacatccacatagagaattaatggtgcagtcattttgattcttctaagaccaaatctcttttaatgactgctttcaaagcttcagccagttcattgcgattacgataaatatgcgcctgtttaaaaggagaattatcaaaattatctaattgatgtaactccttaacaattgttcccccaatccataatgtactagggtcaatctgtccgcattccacttcatctataaactcttgtgtaaatcttgcttccttactcttaggctcgcaatattcaaagcagtaagaaatatatgaaggcaaattatttgtccattgaaatacaaaactatcaggacaaaaaggataattaaaaatattactacttcctcctaccttgggaagattcataatgccatctatcagaggtaaaatccgcgaaaaatctctgagatgagtggcatcgattccaaaataatattgatatcgagttgcatgatattctgtgaaatgcagcgatgtactatccttgtctctgccactttttgcccctaacttgactgcaccatcataaggcgttagcgaaacagccatattcatccctaaagcacccgttcgctgattaagagtgctggcttttgtttgtttcttttttctttttgttgttgaaatctcctcttctgtttcagcagactctaataaagcaaacccaaaaatatcatcatcataaaattcttctggatcgaaatcttcacttgttaaccgattaatatgttcatcttcatcccaaactcgattaactagataaccttgctgttgaagataaaaacgtaaagcccaacgaatcgcacttgaacctacgaaagaatgaattttaccattccaatagcctttttgcagagtagtcttatttcctcgtctcatgtcatgatttaaagaagctaaaccataacgagtgaggactgttccgtaaagataataattggggatattattgtcattcttcttctgagtcatcattcattttggtgagtttatttttgggtttataactggcgatcgctaacaaagaccaaattcttaattcttgccaaggtatttttttaattagtagtacaatctcttcttgatgctgattgaaatacttatttaatccccctcttactaaaaagtcggataaatattccttaaacgacaattcatcataacaatagtttaactctgcccttaaccgttcaactttcttcttaattggagggtctttcccttcctgggctttggcatacattttagcaaagttgcccttcatagcttgctgaaataccttaataaaaataagatactgcttgtcttcttcactattctctgccattattatgaatccttcgcggttgaaaaatagctggttaaataaatatccttgtgaatcatctatcaccaatttttcccaaaaattagaccaccaatggattcctttcactaaattatcagcaatcagggagcgaatcggattcactttaataaaaatttgcttgggttgaatcttctgataattagttggaaaatatttttgaatctgttgataagtgattaaagtatttttatcgattttaatttcttctatactcatcaatgttctttgacgagaatctttattcattttttcatataaccaaacttgacaagcttgatagtagtcaccttgaggctgaatatcgtctaagctgtaataaagtaatccagcttcaccaagactactaacatgaagctgtttcgtttctaattgctgtaatcgccatcttctttgagaagcatcttcaaaatccttgatttctggaatcaccaccaagtagcgatgggttttcttttccttcaagtcttctgatggaatatgaagtaagcaataatgacaaactactggtacaaataataatgctaaggcgtattcaggcttttcttccagttttgtagtattctgcgtcctagcatggcgaacaattccccctaaatacaaccaactggttatttgaacataatcctgtctgagttgttgggtatctgtatcacataacttctctgcaaaggtttgatgtgcgtaccaagttagggatttatattgatactcgacttttttttcttcaaacgttagttcagtgttaactagctttcctgcttgataaaacttattaagacgcagaaaaacagcacacattccctcatgaatctggattttttgagttaaatctattgcattattgtctaatcctgctaaatgaattaaacctgtatcatctaattgaaaagactcattaattaaccaagatatggcgacaaaatcacttccttgccagaataattcaatagtatcagcagttaaagaccatgatatgtgtcctccccgttgacgagatgagggatattgcttttctaattgctttaaagtcatataaagtcccgtcattcccaccctgtgtattattgtcgtatccgcagcaccgagagatagagaaattttgggttgggtagcaaccataatcaggtttcctcttcttccttgctgcgagtcgctgggacaaatattccacacatcatctttcgtttcccaccaatcccctgttcttgcaaggttaaagaatcttctgggttgagttcgctgatttttactccaaatcctcgaatttcaaactttttctcttctttattgatggttaattgtcttttttgaggcgttccatcttgccgggtaagtaattcaattttcccttgtattcctatattatctagttgtctttgaacagcttcaataaagttattagagtcttgaaaacctttaattatcactaatctggaatagacactttctgaagaaattaacggtttgtagtcgggaatatctagttgataagaattttgacctatgtgaaaagcttgacccgctaaataaggataaattaaaggaatttgttgatgattaatccgaatttttagacgagattgagcagttagttcaagcaaattgttcctagtcggaattccagtaattggatgaattccaatagattttagttcgtgaaggctaggacaaatcctggacaaagcactatagacagcataaccattatcaagaggaatcggtgcgcctctaagtttaaaggttaggtctaggtaatattcactgtttatagctgtggctatcacggttaagaatttttagaaaatttgatactaaagtttgaaataattccaatattttaagtaagtcggtgagaataaacctaactatataacagattgtaaaataggtataacccttgcgattgcttcattctacttcgtttcattcgcaatgacatagagtgaattatttaagccgttctacttatctacaatagtacattgtaaattaagtcaaaagctcaggttatcgaagtataatttttattaaaaatttagattatttaacaaaaaaccatcgtcatggacattgacataatccaaattcaaccctactttgaggatgagctatggagtccagagaaatttccaatgcttgagcgaagtcgtttacatcatttggaaccgattggtatagggactcctatggttgagagtttaaccagttatgtgacacgattagctcattctcatggggtttttgtcaatatattactatcaagaatagttaatccactcttacaacaaacctttattaaaaattctaccagtagaggattaaaaccattttttaaccgttctcatgccttaaatggatatgggataatggctactgattttgttgatgttcttaataaattaactttgcataatcagctagagttattaacattaatacccttctcaaacattttagttacaaaaggtttattacgttctcataaagcttggtgtccaatatgttaccaacactggaaacaaaagaaacaacttatttatgatccattactctggtcattcaatgatgtcaagatttgtttaatacatcaacatactcttgtgcaaaattgtcctcattgtcatagtcaattactttggttaaactggaaatccactttaggctattgttcacaatgttttcagtggttaggaggatattctaaaacttcagtagttgatcgggagagatggatagtagaaaatttgggagaatttcttaccaatgcaaatcagttatcttctgtacttactcaagagcttataccaaaatctttcacccatgtagtgcataaagttagcggagataatatagctgcttttgctgcaatgcacaaaatacctaaaaatactttctggggttggtattcaggtaaaacttgtccctctttatttgctttactgcaaatttgttataatcttaaaatttctttatttcagttcttcacacaagatttcaatctatcaacaaatcattgtcaaaatctcaagcttgacatgaaatattctaataaaatacgttcatctcccaaaatactcgacttggatcatattgaaaataccctgaccagcattttatctcaagcaaaagatccattaccaacaattgcagagatagccaaacaattaaaaattaatagacgagttatttcaagacattttcctttattatcccatcaaattgtcgttaaacgtcgcaattatatgggtatgtgtcacttagctgctattgagcagtgttgtcaagaaattgtagaagctattgtctcactccatcaatcaggagaatatccaaccgagtctcgtgtgtgtgagctgattagtaaccccggctattttcgttataagaaggttcgactattctataagaaaacagttcaatctattttaagtaggttgtgaactttcagtacgaatggaaatggttgataattcacattgattttttcaaaatttttcaggcatgattttgccgttactgttttcaagcatagctttgccgttgcggcaaaatcaaactttaaatcacacgatgataaataatcaatcactgaaaaaatatggacgtaactggattcgaaccagtgacc

SEQ ID NO: 893 - DNA, 32767 bp, Nostoc sp.
  variation 5464: note = n is a, c, g, or t
  variation 6446: note = n is a, c, g, or t
  variation 6456: note = n is a, c, g, or t
  variation 6464: note = n is a, c, g, or t
  variation 6563: note = n is a, c, g, or t
  source 1..32767: mol_type = other DNA
aagagtccggtcttaaatagtatcaaaaaaaagtctcgatttttgcagttcgcttaatattacttacacctttgccctcttatttctctgtgtcgcgccagttgctacaaaggggggaacccccgcaacgcactggcttctctgcgcctctgtggttttattcttctttaacgaaccgcagagacgcagagggcacagaggtaaaagcgaaaattctccgaaatattgagatgcaaagatgtaaataattttatccttttccacaaggatatgttaagacaataccagattattgcactaccaggttatgtccatagatttacgggaattttatcaggctagcgatcccagcagaactctgtttgtcaacaatagctctgatggcaagtattatatagatttttcctcggtacgaggtggtgatattcttggcaagctgaagcagaaaattactttttttaagccgaatgaacccacttgcactttatttacagggcatattggttgtggtaaatcgacagaactattacggttacaggctgaactggaaaagttaggcttccacgttgtctattttgagtcgagtgatgacttggaaatgactgatgttgatattgctgatgtgttgctagcgatcgctcgtcgggtgagtcaaagtcttgataaaattactctggagtcacccaacaaatttaatgagttgctgcaaggtgcttggaaggtcttaaactccgaggtgacggcgggaaaagttaagcttccggtgcttggtgatgtcggtttatccgcagataaagaaaagttttctctgtctgtgggtattggtgagatcaccgcgaagatgaaaaatgacccagcgctgcgagaaaaactcaatcagtatttagcaccgcaaaaaactaaactgctggaagcgattaatcaagaattattggaacctgcgatcgctaaactcaaacagcagggtaaaaatggtctagtggtaattgtcgataatcttgaccgcatagataatcgtgccaaaccttggggtcgtccgcagcaggaatatttatttgtcgatcagggcgagtttttgacgaagctgaattgtcatctcatctacaccatgcctttgtcgttgaagttttccaatgattacggaatgctgactcagcgtttcccagaagaccccaaggtgttaccaatggttcctatacaatggtctgatggcagtgttcatacacagggaatgtcactcatgcagcagatggtactagcaagagcttttcctgacatgacaccagaggagcgtttaaataaagttaccgagatttttgatagtgctgctagcctagagcgtttatgtcaaatgagcggtggtcatgtgcgggatgtgttgaggctgctgaatacttggattatggaagagatgagtcttcccttaacccgtgaaaccttagagcaagttattcgttctcggcggaatgaaatcatgttgccgatttctgaggatgagtggcaattgttacgccatgtcaaggaaaagaaaaaggtgagtgatgaccacggatatcaaaaactgatccgcagtcggtttgtgtttgaatatcgggatggtggtgagtcttggtttgatgttaatccggttttagcggaagccagggaattaggtttgtagtaagcactttagtgcttattattccatatctttgaaagcactaaagtacttactacgaactcaacacataagggacttccaaataaaaaaatgtccccaaagtaacgcaaaaaccctctctatttctcctctctctgtgttctctgtgtctctgtggttcgtttatttggataattttttcttggaagcccctaagtttatgagtccacagcaaccattagaagatgaccatgtaaacagcgagcgctccctgaaacaattagcttgggcgattgaatcctccgtgggacagtttaagctgattttggcacggtgtaattatgctagcttgcgcgatcgcttaatctccagactgcaagaaatttgtcaagtcgaaattcgtatcttgacggtacagcaatcgaacaggactctttatactgccattcaggaagaattcggcgcagaaacaccagcctgtgtgatggttgtgggtttggaatcagtgcagaatttgcctgtgatgttaacttctgcaaatcaggtgcgggaagagtttcgcaagaattttgcttttcccttagtgttgtggattgacgatgaaatctacaagcacctaatacagcttgcaccagatttggaaagttgggcaactacaaggaattttgccatatcaacacaggaattagtagattttatcatccaaactgcccatcaatggtttagtaataatttgaaatttagcgtcaatgtatatctgaaactggaaaatgagttagaagcagcgcaaagagatttaattaaaaagcccgatatttataatttagaaattcaagctaacttagaatctttattaggttttcttaaacagataaataatcaaaaatattcggcgttagagcattatcacaaagcttatcagctctggcaacaaagtcataatttagaaaaacaggcaaaagtcatcggtgaaattagcttttgctgttatctcaaagctttgaaacatcaagatatcaattgtcaagattggcagacaacttggcattatcttcaagagtatataaattttattaaccagtttcaaagtccagacttaattgctaatgcagtagttaagttcggtgatatcttgcgagacttgcaaaagtgggaaatattgcatagtctttcggaacaagctttagtaatccatcaaaataacaaacaaccaaggggattagccaaagattacggttttttagctgaggtggctttggctcaaaaaaactgggttaaagcaaatcagttagttaagcaagcattagaagtttttgctgcgattccaaatttggaatcagctaatctatcagggattttatctgatattcccgaaaaggttataaaatcaaaagacttgagcttatatcgatttattttaggtcgttctcaatactatttaggtcaaattaaagaggcaactctcagtttagaaactgctagggatgtgggtaatcccctagaagatatcaggcttttcttggatattctcaggtttttacagcagctttactttgagcagaaagaatatctcaaagcatacaaaatcaaacagcaacggcgttccattgaacagcaatttggcttgcgggcttttattggtgcgggtaagttagaagctacaaaacaggcatttgtagagacattgcgctcaaactctccccaaggaaatattgccccagaaattgctgcatctggtcgcctcttggatgtagaacgtttaattgaacgcatgggtcgccccgattataagttgatagtaattcatgggcaatcgggtgtcggcaaaagttccttagtaaatgcaggactaataccagctttaaagaataaagcaatcggcactcaagattatttgccggtggtaatgcgcgtttataccaactgggtggaagagttggggaggcttttgggagggaatggggagtggggagggttagaacgtcaacgttcagcctttgaactcggaacttcgacctctgaacttggaacttcgacctctgaactcggaacttcgacctctgaactcggaacttcgacctctgaactcggaacttcgacctctgaacctcaacgttcgacctttgaactcggaacttcgacctctgaacctcaacgttcgacctctgaactcggaacttcgacctcagaacctcaacgttcgacctttgaactcggaacttcagcctcagaacctcaacgttcgacctttgaactcggaactccacaatatttaatattcagacttaaaaaaaatgaacaatgcaacatccgcacagtgttaatctttgatcaatttgaggaatttttctttgtttacaccgaaccagcccaaagaaagcaattctttgagtttctgggagagtgcttgaatgttctatcggtgaaagttatcttatcgctgcgggtggattacatccattacttgctggagtgcaatgatttgtccagtctcaagattattggcaatgacattctcagtaataatgtgctttacaagttagggaacttctcacctgctgatgcgaagtcaattattcagcgtttaactgaaaatactagttttcacttagaacctgctttagttgaacaactggtacaagatttagccggagaattgggtgaagttcgtcccattgagttgcaggttgtgggggcgcaactgcaaacggagaatattacaactctggcagaatatcggcaacgcggtactaaggacgaattggttaagcgttatttgcatgaagttgttaatgattgcggtgaagaaaatcagcaagcagcagacatattactttatttgctgaccgatgaaaaaggaactcgccctctcaagactcgcgctgagttggaacgcgatttgatgccgtacttctcggagattcccccaatccctcttaaaaaagggggctttattctttttacatcctttttaaggcgatcgcagcaggcaaaagtaagtctgagccgcggctttcgtcgctcagaacttcagggaggatcaaaagctagggagaaacaagcttctgaaatcagtaaattagatttagtgttagagatttttgtccaatccggcttagtggttttgctaccagaaaacccggctgaccgttatcaactggtacatgactacatcgccgcctttatccgccagcaacaggaaccgaagttaaagcaggtaatggcggaactggaaaaagaacgagaacaaagaaaactgagtgaggcgaaactaaataactttctcaaacgcgccctttttagttccatcgccgcaggtttaggatttgctgggttggcagtggtaacattccagtggacagtagaggcaaatgttcatctaattaatgccattaataattcttctgaagccttttttgcctctggacaacatccagatgctttaataacagccttaaaggcaagtaacaaactcaagcatacaatttgggcacagcacagaagcgatacccgaatgcaaactgtagcaactttacagcaagcagtttacttaaagccaaatgagccgaaagaaaatcgtgcgatcgaggtgaatactttagaaaggcatagcagcgcggtcagaagcgtcgcctacagccccaatggacagcagttagcttctgctagtgatgacaacacgatcaaaatctgggatgtcagcagtggtaaacttctcaaatctctgactggtcatagcaaagaagtcattagtgtcgcctacagccccaatggacagcagttagcttctgctagtcgtgacaacaccatcaaaatctgggatgncagcagtggtaaactcctcaaaacccttactggtcatagcgatgaggtcaaaagcgtcgcctacagtcttaatggacaacaattagcttcttctagtcgtgacaagacgatcaaaatttgggatgtcagcagcagcaaacttctcaaatccctgactggtcatagcaaagaagtcaatagcatcgcctacagccctaatggacaacagttagcttccgctagtgctgacaacaccatcaaaatctgggatatcagcagtcaaaaaatcctcaaaacccttactggtcataacgatgtggttatgagcgtcgcctacagccccagtggacaacagttagcttccgctagttatgacaagactgtcaaaatctgggatgtcagcagtggcaaactcctcaaatctccgattggtcatagcagtgtcgtctttagcgttgcctacagccgtgatggacaacagctagcttctactagtgatgacaacaccatcaaaatctgggatgtcagcagtcaaaaactcctcaaaacccttactggtcatagtgctagagtctatagcatcgcctacagccccaatggacaacagttagcttctgctagttgggacaaaaccatcaaaatctgggatgtcagtagtggtcaactcttcaaatccctaaccgatcatagcaaagaggtcaatagcatcgcctacagccccaatggacaacagttagtttctgctagtgatgacaagactatcaaaatctgggatgtcagtagtggtcaactctttaaaacctttactggtcatagcaattgggtcattagtgccacctacagtcccgatggacaacagttagcttctgctagtgctgacaagaccatcaaaatctgggatatcagcagtcaaaaaatcctcaaaacccttattggtcataacggtacagtcattagtgtcgcctacagccccaatggacaacagttagcttctgctagttgngacaaaaccntcaaaatntgggatgtcagcagtggtcaactcctcaaaactctgtctggtcatagccattgggtcattagcgtcgcctacagccccaatggacaacagttagcttcngctagtgctgacaacactatcaaaatttgggatatcagcagtcaaaaaatcctcaaaacccttactggtcataacggtacagtcattagcgtcgcctacagccccaatggacaacagttagcttctgctagcgctgacaacaccatcaaaatttgggatgtcagcagtggtcaactccttaaaacttttactggtcatactgatgcggtcagaagcgtcgcctacaaccttgatggacaacagttagcttctgctagtcgggataagaccatcaaaatctgggatgtcaacagtggtcaactactcaaatccctgactggtcatactgatagggtcaatagcgtcgcctttagccccaatggacaacagttagcttctgctagtgctgacaaaacaataattttatgggatttagatttcgataatttattacttagtggttgcagtttgctgaataattatctcattgcccatccagaagtgttagaagagttggaatcatgccaaacgcgatcgcggttggttcaagccgctacagtattagttatccaaggtgagaagttagcgcgaaatgatgatattaatggcgctattgaaaagtttggcaaagcgcagcagtgggataataaattaaagtttgattcccaggcgagagcgaaagagttggcgaatcaagctaagggtgacaaggggacattaccataatgatagataatcacaaggtagaagaatggcatacagcgatttcagtctcgccaaggtgaaaaagagttttgatttaagactcgatgaaactcagaatttatttgttgatacaaaacctgttacaccatcagaaactctcagaacgattttaatagattacattcctttagcaactgcaatttcaacagaaaaagctagatcagagtttttaattgcaccaatcctcgcagaggtcagacgattattaaataataaaatctccctgttctctggaaatgaatttaatgttgatgcaactcaaggcttgcaaggcttttgcgattacattatcagcaactcccaagagcaattatttatttctgctccggtaatgtttatttttgaagcgaaaaaggaagatattatcggcggtctgggtcaatgtgtagcggcaatgattgcagcgcaattgttcaatcaaaatcaaggtaatgaagttgggcggatttatggctcggttactagtggaactaactggaagtttttatttttagaagggacaactgtttatatagatttgactgagtactatattaaagaagttgataaaattttgggtattttattgcaaccttttcaacctgttttaactgctgtttgaatatacagcaggtactgatataacttacctgggcaaggttaaaaatttgctaaaaaataagagaagttaaaaaactcgtccaccattaccactattcaatttatatgagtctattttgtctagttcacggtgctttccaagccacctggtgttgggatttgctaattccctacttagaaacacagggtaacaaaactgtagcaatggatttaccaattgaaaatgcatctgctactttgtcccaacttgcagatgtagtaattcaagcactgccaaaaactgatgatattgtcctagtcggtcactcaatggctggtactataattcccttggttgcagaagcggtaaaagtgcgtcaactagtgtttgtggcggcgctacttccatatcctggagttagtacactcgaccaattttctcatcgtctcgattctgatacgctcaaatcattcaactaccagccaaaagacccaagtaaactccaacagttctacgatgagcctgatatgtatgaaccagcttccgtaggcaaagattattcagacgaagcagtattaagggagtttttctttcatgattgtcaaccagatgtaacacagtgggcaatctcgaaaagtcgttcgcaacaatctatggcatatatatttgaaaccaatcctctaaaagctttgccaaatgttgagcgtaaatatattgtttgtaccaacgatcgaataatatctcctacatggtcacggtacgctgcaagcaagcgtttaggagtcgatgccattgagctagtttctggacattgcccacatctgtctcatcctgaccttcttgcctcaatattaactagtgattaattgtttgagcaatcaaaaatcttttgcccaagtggactatcttactggtgcgttggcgcagcccgccgtaggtatcgctcataataaatgaagccccatagatataagagaggtcatcttacctacggtgccttatcccgtatttgtcccccactacatgaactaaacaatattgggattcatccgattgctggaataccgaccagaaacaatttgcttgaactcactgctcaatctcgtctaaaaattcggatttatcatcaacaaattcctttaatttatccttatttagcgggtcaagcttttcatataggtcaaaatttttatcaactagatattcccgactaccaacctttaatttcttcagaaagtgtctattccagattagtggtaattaaagggtttcaagactctactagctttattgaagctgttcaacggcaactggataatctaggaatacaaggaaaaattgaacttcttacccgacaagatggaacacctcaacgaagacaattaaccatcaataaagaagggaaacagtttaaagttagaggatttggcgtaaaaatcagtgaactcaatcctgaagattccttaaccttgcaagaacagggcattggtgggaaacgaaagatgatgtgtggaatatttgtcccagcgactcgtagcaaggaagaagaggaaatctgatcatggttactacccaacccaacatttccctatctctccatgctgcggatacgacaataatgcaccgcgtcggaatgaccggactttatatgactttaaagcgattggaaaagcaatatcgcttatctcatgaacggggaggacatatatcatggattttgactgctgatactattgaattattctggcaaggaagtgatttcatcgccctatcttggttaattaatgagtcttttcaattagatgatacaggtttaattcatttagtagggttagacaatgatgcaatagatttaagccagaaagtccacattcatgagggaatatgtgctgtttttctgcgtcataatcagttttatcaagcgggagagctagttaacactgaactaaaggttgaagaaaacaaagtcgagtatcaatacaaatccctaacttggtacgcacatcaaacttttgcagagaagttatgccaggcagatacccaacaactcagacatgattatattcaaataactagttggttgtatttagggggaattgttcgccatgctcggacgcagaatactacaaaactagaagagaaatctgaatacgccttagcattattatttgtaccagtagtttgtcattattgcttacttcatataccatcagaagacttaaaacaaaggaaaccccatcgctacttggtggtgattccagaaataaaggattttgaagacgcttctcaaaggagatggcaactacagcaattagaaacaaaacagcttcatgttagtacccttggtgaagcgggattactttattacagcttagacgatattcagcctgaaagcgactactatcaagcttgtcaagtttggttatatgaaaaaataaatcgagcttctcttcaaagaacattgatgagtatagaggaaattgaaattgataagaatactttaatcacttatcaacaggttcaaaaacactttcaacccaattatcagaaggttagtggtggtagtggtaaacaagtagtgacttttggggtagctctccttatacaaattgggttacacagacttggaacactacttctatggcactaccatcaaaagattaaacctaagcaaatttttattaaggtgaatccgattcgctctctgattgctgataatttagtaaaaggaatccattggtggtctaatttttgggaaaaattggtgatagaggattcaaaagaatatttatttaaccagttattttccaatcgagaaggattcatcataatggcagagaatagtgaagaagacaagcagtatcttatttttattaaggtatttcagcaagctatgaagggcaactttgctaaaatgtatgccaaagcagaggaaggaaaagatcctccaattaaaaagaaagttgaacgattaagggcagagctaaactattgttatgatgaattgtcgtttaaggaatatttgtctgactttttagtaagaggaggattaaataagtattttaatgagcatcaagaagagattgtactactaattaaaaaatcaccctggcaagaactaagaatttggtcattgttagcgatcgccagttataaacccaaaaataaacccaccaatagtgatgataattcattcccaaacaatcaaaacttagaagaagtgaatgatgagtcagaaaaagaatgacaataatatcccaaattattatctttacggaacagtcctcactcgttatggtttagcgtccttaaatcatgacattagacgaggaaataagactattctgcaaaaaggttattggaataatggtaagatttattcttttgtaggttcaagtgcaattcgttgggcgttacgcttttatcttcaaaagcaaggttatttagttaatcgagtttgggatgaggatgaacatattaatcggttaacaagtgaagatttcgatccagaaaaattttatgatgatgacatttttgggtttgctttattagagtctgctgaaacagaggaggacacttcaacaacaaagagaaaaaacaaacaaacaaaaaccagaactcctaatcaacgaatgggtgctttagggatgaatatggctgtttcgctaacgccttatgatggtgcagtcaagttaggggcaaaaagtggcagagaaaaggatagtacatcgcttcattttacagaatatcatgcaactcgatatcaatattattttggaattgatgccactcatctcagagatttttcgcggattttacctctgatagatgggattatgaatctgcccaaggtaggagggagtagtaatatttttaattatcctttctgtcccgatagtttggtatttcaatggacaaatcattttgcttcatatatttcctattgctttgaatattgcgatcctaagagtaaggaagcaaaactttcacaagagtttatagatgaagtggaatgcggacagattgaccctagtaaattgtggattgggggaacaattgttaaggagttacagcaattggataattttgaaagttcccctttgaagaaagcgcatatttatcgtaatcgaaatgaaatgattgaagctttgaaaacagtcattaaaagagatttgggcttggaagaatcaaaatgattgcaccattaattctctatttggatgttccatttactacttttcgggagtcctatgcaagggaaatgggaaaaacttatcctgttcctcctccagcgacagtgtatgggatgttgttgtctttggtaggggaaacgaatgtctatcgccactgtggggtagaattggcgatcgcaatgttatctagccccaaaaagtcacaaatcttgcgtcaaatgagacggtttaaaaatcctgattttagccatccagagaatcttattccctgttatcaagaaattttgtctaatctgaagtgcttgatttgggttcgttctgacgaggaaaagatacaaccaagtttaagggagaggatacagttagcgtttgaccatcctgagctagtaagacggtttggttgtttatttttgggagaaagtgaccagttaattaaaacgatcaaacttgtttcggaagattatctagagggggcgagacagtgggcgattagggataatcgaggcaggttaaccttaccctattgggttgaccatgtggggtcaagaaatacccgatttttgaggtatcggattgaggaaatgccaagctcaccacctcctgatttggcgtggacgatgattcaatctccaatttgacaagtatctcttatgggaaagggagtttaggatcaaagaatggcgggaaggtttacacggtaagggatatggtaattgagacaagaaaaaaggtgcttgcaatttttgggaaagcttatcggcactgggtttgaggggctgaaagtaagggaaactttggtaagttgtatgcttttggtttctcgatctggaaagtacttgtaagattgtaaatgaaccttgctcagttaagggttttcaaatttgctgtgattcgtggctttatgccgttaggcgttgctcaaaatactcggtctgtttcatttcggttgagtggtgaagtgattcgtggctttatgccgttaggcgttgctcaaatatcgaggtcaaattactgactgcgatcgcataagcccttctgagaaacttttctggagggctttagttgctttaggaagtgagttctgtttagttttgcagacaagacatcagctaatcgcctatggtcttcctgactaaaatcgctactagcaagggagccattaaataaccagttataacctcaagggttgtaaaaaatttaccagcagtagacaatgcatgaatttcactaccaaacgaggtgaatgccataatcgagaagtagagactattccaaaaaccaagcttactcaaagaaccaggagaaagccaatatatcagactaaacgaaacaaccactaataaacagcaaaaaataaacctgctgaacgagcgcccgtaatcgcaagttacatacagaatttttgccagtataggatgcttactttttaggctttcgattctttgctgattggttgcatactcttgtaatagggcagataaattaaagtctatacttctaaggctaaccccagtaaaactagttttattactaaactctacatgatcaatcagcacatccttcatcttggcatagtcaaagcaagcacctttgatattggtttcagatagccaggaatctgttagatccgcatttttaaaattactgttttctagatttgcgccatagaaatcaaccttactcaaatttgccctagtcaaatcctccttaatcaagggtattcctcgaatatccgtgtgttcgtagtacttgccaaccattcgatctaacacgtctcgcttgaaaccatttgttttccagcgtataagaatattttgccctgctggagtaaaccatctatccctgagttgttgcttgctcagatttaccatagttagcaaatcttcttgatttcctcctgtatctaagttcactcctgcatttataaagaattctggggtaatttcttgagtctgattatgagattgcatggataaactggactactgcgatcgtcttatgttccaacggtgctaggttatcaaaacccgttaccaaatttcatccttctgagagcaaacttaacgcaagcgtagtttaccgccgtaggtcttaccctaagccggtcgttgggcatcgctcttaccttcctttgttcgtttgcgctgttgaaaatgtttcacagaagccgccgataaaggcgatggtgtgctagaacgctcaaaaatcccagttttactcactctctgcttcaataccgtaatctgcaaaaaaagcagaaatagatatgttcagcgcctgtgcaagcttttctatattttttagtgaaggattacgagtccctgtttcgatactggaaatgtaattgcgatgaagaccagccctttcagctaactcttcttgagaaaggtctaattctcgtcgtcgccgtctaatagctttgccaaagcgatattcaatatctggatcttggtttttttgcctcacagaaccatcgtgagggagtgtagataattaatctatacacaataagtttagttttgcacactatatgttaatttaaaaatattggtgcaacgctatccgcaataaatatgacgaatacatttcctcagattccgccagtagcgatgccaaaagtaattcccagcgaattccctcagcagagatttcatctcggtgaatgggtgcgatggtttcaagtacccaacggtgactttggccgcgtcatcggagtcatctacacgcaacaagccagttgcattgccactggcttacattacttggttcttttagatgagcgcagtccctctcgtgaaatttgcatctgtgactttgctttcgaggatgatatcgaatccctagaaaagtcatcattggaagggcttcggggcaatcatgtctgaagctcaacaacatcagcagttgctagaactgcacaaccaaatgttcatgtccccccaagattttagctatcgttggggattgggttacgaagaattagcaaaaatctgtgccatctctaaatctacggcttatcactggttgggtggacaagccagccgccgagaagctggattaccttaccagagaattatggctgtggctgattttcttctcgccaacgccgaaataattaatcctctcttagaacagtggcataattctccaccaccaaattaattcttcagtttttgcaaattgacaaaacttttctccatcaccttgactgacacaaaaaataggtagtagggtgcaatttatcgtcaccagcttacccactgttccatgaaccgctcgaccaatgattcctattacctgccctccagtattgaattgacccaaagccatgtcctgattcatcgcatggcaatccctctcaaaaatgcaatcagctatttacaacaatttccccagtcagaatatgaggatatttgccgggatgcttttgagttaggatttctttgcttgcaaactgctcaaactcgtcatggcaacgaattaatcaagcagcagatggaatccttgttggtggagtttcagcaggcagtcaaggtaattgcagagtctttccagcaggaattaattaatcaagtagggacagagaatggccaattattagctccactccaaaatcagattaatctcacttcagctatcctcactgaaaaactcaatagcgtcagcactttacttacactcgaaattgacccagccagagaaacttctgttgttggccgctttctctcttcattacgtcaactcttagatgccaaacgctctgattccattcaaggcgcatttaaagcagcattaataaatgccactaaggaaaatggtactctggctgcggcagttaaaaatgtagtttctgagtctgtgaaaccattaaccgaacaagtggaaaagctgactagggaaattcgagatcaacaggtgacacaacaagtacttgagcagacaactgcaaaaggcatcaactatgaagagttagtggttgtcgaactgcgaaattggtcaaagttgagtggcgtagaggtggagcatattggtcgtgatggggatactggcgatattctcctaaagttcaccagtaaatcgttagctgtaattgaactgtcaatagtgattgaagctaggaaacgaccctcaaagccttttggtcgccaagcaatcactcaacatttacagtcagcaatggtgcggcgttcagcaaattcggcaatttttttaagttattcgcgtgagggattagcgcaggaaatcggtgattgggcagagggagtttctgagtcgggttattggattgccacaacccatccatttttaatcattgctatccgctttttggtgatccagcaaaggttaaataaattgcgtagctttgaatcagaattggatgtgactgctgttgaacaacaaattcagcagatccgcacagctttaggacgaatcagaactatcaaaaaatccctgacggaaattggtaagggtgtgactgtgattaaagctgaagcagatgcactgagtacagatattcaatcagcactgaaatcaattgagcaagccctgagttttgttccaagtgaaagtactggctaacattttagctagcatactcctgcaatatttctcactcaataacgcacccaggattttttaattcagctttcacaaaaattgatggcgcgatcgcgtattagatcgaaatagctatagccattctcatcttcgccagccttgccgctagtgccatagaaggatttttcgagagcattaataattctaggacttacgcactgtacaaacgaatcatcttgtgtgttagtctatacgttgcttagacaccacttcttggcggtgctagcgattgcccagtatgagagataaatgacgaacggacaaaacggacaaaacggacaaaagaaaaaattagaaactcagctttggaatattgccgattcgctacggggcaagatgaacgctgatgagtttcgggattattgcttagggtttattttctacaagtacctatccgagcgtcagcatctttacgctaatgagattttagctgaggataagattgattttctagagcttgatgagtcgtcggaagaggggcaggaatatttagaggcaattaaagaggaatctattgccgagttaggttattttttgaagccatctgagttgtttagttctctagctaaacgggcattaggcaatcaggccgataaggatgagattagtgatgaggagttagaaaagagttcaatttttattttgggggatttgacggatgttttaaacaacattgaacgctcgactatgggcaaggaaagtgaggaagattttgatcatttgtttgaggatctggatctgaattcgacgaagttggggcggactccgaaggcgaaaaatgctttaattgccaagattttagtgcatctggataagattgattttcggttgggagacaccgagagcgatgttctgggggatgcatacgagtatttaattgggcagtttgccagtggtgcggggaaaaaggcaggggagttttatacgccgcagcaggtttctaaggtattggcgaagattgtgacaacggggaaagagcggctgaagtcggtttatgacccaacttgtggttcgggatctttgctgctacgggtggcgcgggaggtggaatcagtcggggatttttacgggcaagaaatgaaccgcacgacttataacctagcgcggatgaacatgattttgcatggggtgcattatcggaattttgatcttaggcaagaggatacgctagagaacccccagcatgagggtatgcggtttgaggcggtggtggcgaatcccccgttttcggcgcagtggagtgcgaataagctgtttgagtcggacgatcgctttagtcagtatgggaagttagccccggcttctaaggctgattttgcctttgtacagcacatgctgcatcacctagatgagaacggcattatggcggtggtgttgccccacggggttttgtttcgaggaggtgcggaggggcatattcgccagtatctaatcaaggagcggaattggttggatgcggtgattgggttgcctgcgaatattttttatgggacgagtatccctacttgcattctggtgttgaaaaagtgccgggaatctcctgaagatgttttgtttattgatgccagtgcctattttgagaaggcgaagaatcagaactatttgcgggatgaggatgttgaaaaaattatttccacttatcgccaaaggatagaggaggagaagtatagctatcgcgcaccgttagcggagattgccgagaatgattttaatttaaatattcctcgttatgtggatacgtttgaggaggaggaggagattgatctggcggctgtagcggtaaagttgaggcagtgcgatcaggatatggtggcgatcgatgaggcgattaaggggttttgtgatgagttggggattgaagcgccgttatgagtaagaagttaaataaaaatgttcctaagttgagatttcctgagtttaagggtgattgggaatatttgaagattgaagacattgcttcagtaacatcaggtggaactcccaacagatcagagcctagcttttggaatggtaatattccctgggttactacaagtgagatcggtcaagctgaaatacatggcagcgttgaaaagataacagaaaaaggactacaaaattcttctgcgaaaatcttcaagaaggatactattttacttgcaatgtatggacaaggaaaaactcgcgggcaagtttctattttaaagattgaagcagcaacaaatcaagcttgtgcagcaattgcactaaaaagtggttttaatttgcaatttgtttactatttcctttttaaagaatacgagaatttgagaggattggcaaatgatggctctcaaaaaaatttaacggcaggactaatcaagcaatataaagttccagtaacccatattaacgaacaagaaaagattgctagttttttgggggctgtcgatcgccgtttaacccaactccgccgcaagcaggaactcttgcaaacctacaaacgtggcgtaatacaaaaactcttctcccaacaaatccgcttcacccaacccgacggctcccccttccccgattgggaggaaaaaactttagaggaagtatgtgatattacatccagtaagagagtctatttacatgactatgtaaaagagggaatacctttttatagaggaaaagagattacagaaatcaagaaaaatataaagccagttgatattttatatattactgaagatagatatcaagaatttaaaaataaatatggtgtaccaataattggagatatattaattactgctgttggaacactaggaaacgtcttaaaaattagaaataatgaaaaattttatttcaaagatggtaatttaatatggctgagaaaagccaacaaaaatattaatgtagattttttagaaattcttctcgaaaacagccaaaatcaattacttaaaacttctataggctcaacacaaaaagcattaacaattgttggattaaaaaagataagtttatttttcccatatcttgaagaacaagaaaaaatagccaacttcctaaccgccattgatcgcaaaatcgaagctatatccagccaaatcgaccaaaccgaacaattgaaaaaaggcttactccaaaaaatgtttgtgtaatgaggtgttatggatagtttagaaaccctagtaaaaagacatctcaaagaatttcctaatttccaatactatggtgcatttgcagaatttattagcgcaatcgaaaactatcatgaggacttacacaccggagtgagtttagactgttgtaattctctactacaaagcatctgtaaaacaatcattactcaaattgatccgagagtagaaggaaaaactttaaataaaggagcgaaaagcgaaactaataatcttatctctgaggcagccaagttacttcaaaaaaatgatgatatatacgagagggattttattagtaaactctcacagataggaaaacatattaatgaattaagaaatgcgagaggtgatttatctcacggaaaacatatacccaaagaactgctaaacgatcaagatttatcacggctgctgagagaaataacagaaagcctatcccgttatctcatatcttcgtttttcagttttgcattggaaaagaaatcaaaagaagattttgaaattaaagaaaacagaattggatatgaagatcatccagaattcaatgatttgctagacgaagagtatcccttggacggcaaactactttacagccaaggattatatgaactgtactatgaagattatgagatccggctacaaaccttccttgatgaacaagcattgttagacgaagagtagggcattacggataaatctatttgtgtaaaatcaaagtgcagcagagatttttctatatgaaagtgtgcgagtcatccaatccaggagtttccccacaatgatcgcagccaaagacaacgccccccgcctcaccccagatgagtactttgcctgggaagcaacccaactggaaaaacacgaatacatcgacggcaaagtttacgccatgagcggcggcagcgttaatcacagtcgtatcgccatccgcttcaccgccatgttcgacagccacttagaaaatacaggttgcatcaccgtaaattctgatgtcaaagtcaatatctttggcagtaataactatacctacccagatgccagcgttacctgcgacgatcgcgacaaaaccacaacccaatatattacctacccctgcttaatcgtcgaagtcctctccgccagcaccgaagcctacgacagaggcggcaaattccgaatgtaccgccaaaacccagccttaatcgattacctactagtaagttccactagcatcgaaatcgatctatatcacaaaaacgacgcaggcgactggttgattatcaactacaaagcaggcgacgcgatcgaactcaaaagcattaaccttaatttccctattgaacaagtctatcgcggtttaaccctcaccccagaaatcccaatagacatcattaggaaatagttagttagtaatacttttatcccattccccattccccattcccctatgccccaaaccgaagcagaactcgaacaaaacctgatcaaacgtctgacggggctaggctacaaacccgtcaccatcagcagtgccacagaactaaacgctaacctcaaagcccaactggaaaagcataaccacatcaaactcagcgacacagagtttaaaagtatcctcaactacctcgataaaggtaacgtatttgaccgcgccaaacgcctgagggaaaacaaaatggctctcagccgcgacgataacaccaccttttacctagaattcctcaacactaaacattggtgtcaaaaccaatatcaagtcacgaaccagatcagccagcaaggcaagtacaaaaaccgctacgacgtaaccctgctgattaatggtttgccccttgtccaaattgaactaaaacgccgagggttgggacttaaagaagccttcaaccaaatcaaccgctaccagcgtcactcctacggtgcagacaatgggttattccagtacgtccaaatattcgttatctcaaatggtgtcgatacccgctactacgccaacaaccgcaaacaagaatataaacaaaccttcttctgggcaaaccaagacaacaccctgattacccaactcgaagactttgccgatagctttttggagaaatgccacgtctccaaaatgatctgtgaatacattgtccagcacgaatccgacaaagtgctgatggtgctacgcccctatcaatactatgcagtagaagccatcatcaagcgagtgaaggataccgataaaaacggctatatctggcacaccaccggatcaggcaaaaccctcaccagcttcaaagctgcccaaattctcacccaaatacccaaagtgcataaagtgctgttcgtcgtcgatcgcgccgacctcgattatcagaccagcagagaatttaattatttcagccccgactgcgtagacaccactgacaacacccgccaactggtagaacaaatggctggggataatcgcctcattgtcaccactattcaaaaactcaaccgagcgatcaaatctcaaaagcatgaagcggcaatggagcatttgaaagataagcgcattgtgtttatctttgacgaatgccatcgttcccaatttggcgaaacccacaaaaatatcgtcaaattctttacccaagcccaaatgttcggctttaccgggactcccatctttgccgataacgctgctagcaacgaacacggtaaacgcaccaccaaagacctattccaggaatgtctgcataaatatgtgatcactaatgcgatcgctgatgaaaacgtgcttaaattttccgtcgagtattggggcaaaatcaaacgaaaagacggcacgctgatcacagagccaaaattagaccgagaattctttgaaaatcccgaccgaatttctctaattgtcgattggattattgccaaccataaccgtaaaacccacggtagaaaattctcggctatgctctgcgccagcagcgtagacaccctaataacctattacgacacgttcaaaaacaaacaaaaacagggattacatgacctacgagtgatcacaatttttacccctggcgataacgaagaagaccaagacgcaaacggcttaattggagaacccgattttaatatcagcgcagatacaagcaaccgtagccatagccgcgacaaactgaatcaatttatcgcggactataaccaaatgtaccaaacccaacattccgccaaagatagtcaggctttctatgcctactataaagacatcgccaagcggatgaaagaccgcgatcgagaaaactttcaggatcaggaacgcgccgatattctgttagtcgtcaatatgtttctcacggggtttgatgtcaaaaagctcaatacactttacgttgacaaaaatctgaagtatcacggattaattcaagcatactcccgcactaatcgcattttgggcgaacttaaatcccaagggaatatcgtctctttccgtaatctcaaagataacactgatcaagccgttgccctcttttccgacaccaacgcaagcgaagaaattttcattgaaccttacgaatactacattgaaaaattcaatgacggggtgcaagaactgagagcgatcgccactattcctaacgatgtcaataaactgattagtgaagacgaccaagttgagttcgttaaagcctttcgtaatcttatccgtttacagaatgtaagtaaatcatttactgaatttagtttttccgacttaaatctagatgaacaaacctttgaagattataaaagcaaatatctggacatctatgatagaacgcgatccaaacccgatgacgagaaagaatctttggttgaggaagtcgattttgaactggaactgatccagcgagacgaaattaacgtctcctatattctcaagctgctggctaacctccagcgagacatcaaggatgatgctacccaggaagattaccaaaatcagaaagcgtctatccttgagctaatcgggaaagaagtccaactacgcagcaagcgggatctgctggagaaatttatcgaagagcggctacccaccctcgaaccccaagaaaaagtcgaaaccgtcttccaagacttctggactcaagaacgtattgaagcaattcagcaactctgcctagaggagaacctcaagatcgaagccgttaatcaaatgattgccgactacaaattttctgggaaagaaccattaagggaaactgtgttgagtgcttgcaacgaaaaaccgaaattattagagcgtaaaaaaatctttgcgcgagtcgtatcaaaattactcgacatcatcaacaaatttgatgacgctcttggggagcttggggaggaagaataaaacagttctcaaagcgatcgcgccccagtgcgtagcaagcaacaaataaagcgatctccctcctgttctcaatcctaagtaaagcgatcgccaatcgcccctcacaaaccacctgcttttgacaattagttgtctatcgttgtgttgttttgcgattgctgtaatcgatgcgctgtcgcttcaagcttttgaatcgcttcattcagatcaagctcgattagtacttgtatacagtgtccactcggcttgccctttctccgagcagcctcatccagtaatgaatcccgaacagatttaagccaatctaattcctcaaataatttttcattgttgccatcgaacttatatcgttcttttattgcataaccaatagtcatctgatgttcaaatttgagttgtagtaagccttctacaaattcagttgtttttatgtctttcaatataggtatttcagcatatctcagtcctggcacgccccagtcatgcgagttatttaaggaaattatgtcgtagaatttccattgatcgctttgcatgatagcaaatagctctctcccaagattaggcaaaatctcaacccttgctaactcttgagctttttcaaggtatgtacaaaaatcttgaaattcttgaagttttgcaccttgaaacgcaagccccttgtatgccccaaatatactgtcagccgtataaactgaataagatactagttttgattgattattatttttcagccaatcaataaagagctttgaactagtcaaaatttcttcttttgtttttgaatataacccgatgtcagaaaaatagagtagaagccctgttacatgttttaggattccgagatcggaaaattccgtgtctctgtttaagtattgtgtttcaacttcattgagcaaaataataaattcgtcatcactaagatgatgaaaatgccataatttcatccatttgggtgtattttcgtcttgaaaatatatactgctagcaagtgattgatcgagttcttgtaaatccaagctgcctttatcaaaaaaagtttgccaccataccgcactaggaaatggatcgtacaactttaacgaaggatacttactaattacttctttaagtgttttcccttcgtcaccattttttccttcatttgaattcgcaaactcatccctactactgtcccgtatacttttcaagctcatgtttgcggatgcttctagcaacctgccaatatctgtaggaaacattttccctctcctaatttcaattgaaaaaggtgtaaggaactttaaaacctcctgaagaagctctggtttattctttgctttttctggcaaaacgtcaaaaattctttcaaaatccaaaacaacctgttttaaaattctcaaattctcgcattgggcttgattgtataagtcttggattaatgaggtgctgttagacaagaactcactcgcatcccgattacttacccctttcagaaaattttcgagtgcctggtcaaattctaggtaaattgcaaaagttttaccaactagcttttctttgatggttgtgtactcggaatttttttctagcttcgtttcatcagtaacgataattacttttaattctttttgttcaacaaaactgttgatataccccagtatattgacgatattcatactgcatcgttctaaatcatcaaatatcacaatactttgctcaaggtttgtaaaatactcagtgagattgacgttaggagatgcaacgctaattgtgccatcgtctctaccatcatgattaaaatcgacttttagcgtgccttttataatttgtgcaaggatattgcctgccagtgctattggtttcgacgacaaggcaggaaatagttgttggaaaaatgcattctctatctctgagaagctagttacaccattaaggctgacatacaagcattttcgctttttctcccttaagctctcgcaataccttttgataaaccatgttttaccagatccccatttacctttaagcaaaacagcgaatccaggtgcatcaggcaaattacagtaataatctaaatactctatgatatggctgttgagttgcgcgttatgctgtttcatgttgctcaaaattactaaaatcaatgctttttcgtggttaatcttggcagcgatcgcctgacaataaaaagcacgctcttaagatacgtacttttttctagtatcagtcggatgattctatcccatattttcagtaatggaaagcgatcgcactccctgaagccaaacacaaagaaatttccctagcagcaaaatactcctgaaacgttaggtgaaaaagggaataataccgatgtaaccggaattgatatcaatctttatttatactaaacttctacaactttaattccagactaaaattcccgaacaatatcttgcccaattccttaaaatctaacccaaacaactgaaatacactaatctttgccttctcgcacacaggaataatcaactttaccaaatgataaggttgactttgatttgttcttgaggctatcctcaacgattccatgattcctcctaaatctcccaataacttcaaatcctttccaattgcttgttcaaacactaacaaaatcaattgtaattttcgggttaactcgatcgggatggttttataacctaattggggagtcagtgcaattaattcactaattccttgaatattaactcgatatttctctatatcctcttcgcctttaatttcctgtcctaaccacccgtaacagcgagaacaaaatcccgcaggtgaaaacctagccatcacaggtaaacgcgaaccacaatgagaacattcttctattaatcgctgtttgtgaatcaaacaaagttctacatccttaaatgaccatgataatggttcatagatagttttgttttcctgcctccactcttcccaacaacaaggacaccaagcacgatagttccgaaataaccctttgtcataaatcatgcctttccagcttaaaagagtcaaaaagcgtaaatcctgacgcattgttaactcttctaagacagtgactaacttttctgtcatttctcgcattccgttaatagccggtttagcgtcgctatttcccaataggtgactcagattttttgacaatagctcagatttatcctcatctttgagaataagtggcgcaatttctcccataacgatcttctgagaggttaaacaatgcgcctgtgccaaacgatggagatagctactaagactttctgcgtagggagttcccaccgccataggttcaagagagaataaccgactccgttgcgggatttctagaggttttaggctccaatgttctgagtaaatagtcatccctcttggattaacctaaacgctggtactttagttttaacagctaaattttagggattagtttccgattcactcttaacctcgataccgtaattaacaaagagatcggagacagatatctccaaagctccggctaacttaacaatattttttaacgaagggttacgctctccggtttcgattcctgagatgtagttgcgatgaagtcctgacttttcagccagttcttcttgggataaatctagctctcgccttcgtcgcctaatcgctttgccaaagaggtactcaatactggggtgtttctgcgtcacaaaaccatactgaaccagtatcactgttaaatccacctactataagtgaatttttgcacaatataagtgttataaagttaagtagtatggcatcaggtaaacaagttcctcactttatggtctgattttgataggttcataaaatcaagtgcaaagcgcttactaaggagtatatgaaagagcaatttgaacaatgggttgctcgccttcaaatatccgaggcagggcaaaaaattattgataaagttcgctcatctgagccatcccgtcgcgttggtggcggtagtaagaatgtttcgggacgctaccctagtcgcaaaatgggagtcacaattcaatttgagtctcatcgggttgaactgccaattatctaccagtttgaacatgataaagatgttctagaattctacgatcaaccaccacaaattaaacttgactatcaagcaagcaacggacgtagattaggcgttttacacaccccagatttctttgttatgcgaaccaattcggctggttgggaagagtgtaaaactgagcaggatttgaaaaaactagcagagaaaagccccaatcgttacttttactctgaagaagataatcaatggaattgtccgccaggagaagactatgctaaccagtttgggctttattaccgcattcgctcagatcgggaaatcaattgggttctgcaacgtaatctgcaatttttagaagattattatcgctcagaatctctagtagtagaagaagcgatcactcaatcattacttgcagttgtgtcatctcaaccaggaatcactttagcagaattactcaatcagtcaacaggagctaaatctgacgatatctacaccttaattattcaagagcaaatctatattgatttaaatgctacaccacttgctgaaccagaaagatgtctaatcttccgtgacgaacaaactgctagtgcttacagattaatggttgagcagccaagtgtaaatcttcaggctatctctcctgtagtcaatattgttactggaacgcttgttagttgggacggcaaaggtttaaatatcattcatgttggagaaacagaggttatacttggcgcagaaaataatcagttaattgaactcaaaaaagctgtatttgagaatctagttcgccaaggaaaaatcaccagtctccaaacaccagaaaaaacagctattagcacagaatcttggcagcgatttcgtcaagctagtcctgaagaccaagcagaagcccttgaacgctacaaaattatcgaaccttacttaaatggccatcccccagaaaacgaaacaataccagcccgtaccattcgtcactggaaagctaaatatctaactgcaattcaaaaatacggttgcggctacattgggcttttgtcccatcgcagtgccaaaggtaatcgtcagcgcaagctgcccgaagacaccttagcaagtatggagaggtttatttcagaagattatgaaactactaaacaaaaaagaatctgggaggtttatgcagctttagttcgagtttgcgaacaatctggtgtaattgctccaagttacaaagcatttaccaaagaagtaaaacgccgtactggttacgaacagactaaaaaacgccaaggtcatcgtgccgcttatcagtatgaatccttctattgggagcttactacaactaccccaagacacggcgatcgcccttttgaaattgggcatatagatcatactgagttagatgtagagctagtttgctctgatacaggtcgaaatcttggcagaccttgggcaacatttctcgtagatgcttactcgcgacggttgttagcagtttacgtaacgtttgactcaccctcatatcgttcttgcttaatggtgctaagaatttgtgtcaagcgtcacggcaggcttccccaaattgtagtggtagataacggtgcagagtttcacagcgtttattttgaaacactactagctacttttgaatgtacaaaaaagcaaagacccccagctaaagctcgttttggttcggtttgcgaacgcctatttggaacttccaatactcaatttgtccataacttacttggtaatacacaaataactcgtaacgtccgccaagtcaccaagtcagttaaccctaaaaatctagctgtatggacacttggtttactttatgaatatctttgtgcttgggcttacgaagtttatgatacagacgaacatccggcacttttccagagtccgagggatgcgtttgctgcgggtatagcgattggtggcagtcgggttcaccgcatgattccttacgatgaaaactttcagattcttaccctacctacaacctcagagggaaaagcaaaagttcaagttggacgtggtgtaaaaattaactcaatctactactggtctaatagtttccgcgacccccaaattgaaaatacctctgtgcagataagatacgatccgtttaatattggtatcgcttacgcctttgttcgaggacagtgggtacagtgtatctctcaatattatgcagaactccaaggtcgttcagaaaaagaattgaagttagctagtatcgaattacgcaaacgctcttcaaatcatgcacaacaatctaaagtttcggctaagaatttagcagaatttttagcatcggtagaagctcaagaagctctattagaacagcgttcctatgatacagaagctagggaagtctttagggtaattgagggtggaaaagcggcaacaagccgtaacgaacaaccaaaacttattcaagttccttttggcaataccgattctcaagtagatgaagatgaagcactcatcccagaaatacttgtagtatatgaggacttttaattatgacaacacttgatgcatttcctcttgaactcctcacgcaacctgctacagaaaggcttgcttactttgagaataaaaccgtagcgcatcctcggcttcaagaagtcaatgaaattcttatgcgaacaattgccgaacccgcaggagcctcatttatctttgtttatggccctagcggtatcggtaaaacaactttgcgactccgcgctgaagagaaattaacagaactagcattacctaaactggaaagcgatcgcgctcatgttcctgttattggtattgaagctatagccccagaatcgagatacttcaactggaaagaatactacacacgcgccttaattgccttggaagaaccattaatcgatcacaagtttgattacggtgtgcgtggtatctctcgcaataattttggaaaaattaatgttgagtcgaaagtagttgcacctgctctacgcagagctttagaaaatgccctcatccatcgtcatccagacgtattttttgtagatgaagcacaacattttggtaaggtggcaagcggatacaagctacaagatcaattagactgtctcaaatctctagcaaatatgacaggcatcttgcactgtctattgggaacatacgaactactgacatttcgtaatttaagtggtcaactctcacgtcgtagcgttgatattcattttcgccgttattgtgctgatagtccagaagatgtacaggcttttaagagtgtgttgttaacttttcaacagcacatgccactagcagagactccaaatttagtcgatcattgggaatatttttacgaacgtactttaggatgtgttggtatagtgaaagattggctgatgcgcgctcttaaagatgctttggatcgagaagcaacaacaatcactctcaaagacttacaaaaacgtgctttgtcggttgctcagtgtcagaaaatattcaaggacattcaagagggtgaactacaattatctgaaacagaagcacatgtacaagacttacgctctgcattaggacttggcgcaaaaccaattgtgctacccgaagaaaccccaaaaactactcgtccgccaaaaaaggttgccaaacgcaaacctaaaagagatcccatcggagtgcagcaagatgttagctagtgtattagaaacatacgaatcttggaatttaaaaaagccattaattccacaacgtagtcgcctctatcaacctcaacctgtaggtcttgggactccttacatagagagtttaacaggttatattgcacggatagcagagttgcatggagttcttccaggagtcttgatgactagagaaattgccccgatggtcaataaattatatttccaaaatggggctaatcgcggttttcgtgaaatcttcaatcgtagtcaagcgttaaatggcatgggagagatggcagcagatttagttcaagtgttacaaaaattgacgcttagagatgacttgcgttttttaaccatgctgttttggtctaacattttgactccacgcaatttatttcgtaccagaaaagcttggtgtccaatttgttatcaagagcggcatcaaaatgggctggtagtctatgagcaattgctttggacaattaacctaattacaatttgcccgcagcatcaaaaacccttgcttgatttttgccctcactgtaatcatgaatcacctttgttaaactggcgctcaagacctggttactgttcaaagtgtggagagtggttaggcgcaaatcaatgccttaagacctttacagatggtgaaggatcaataaaattacagttggagtggcagtattggactgccaatgttgtaggagagctaattttagctgctcaatgctttgaatctgccccatcaaaagaaaatattacaaaatcattaaatatagttattgataaagttgcggaaaataatgcagctgcattttctcgtcttattggagtaccaaaaaatagtttgtggatgtggcagtctactaaaaccttgccagagctaaatacacttctaaaaatttgttatgaattagagatatcgttggtagaatttctta

SEQ ID NO: 894 - DNA, 9885 bp, Cyanothece sp.
  source 1..9885: mol_type = other DNA
acaaaatctcgctcccgtcccttttctttgctctctaattctttcattgggacaacaaccataaagtgaccaaactgacaactataagttgaccagagcaattgtcacttaaaggataaagtggccgcttttaaagcataaagtgaccgtccctggaatttagagtaaaagattgcctataagcataattaactggctttagtttttaagaaagagacgatcaccttttgttacggaataagttctagcgcccttgtagtttaggttttagacagcggccactttatcctttaaaaacggccactttttactttaagtaacagcaatccctgaaatgcttagtttttcgttggcgaattcaattgaaaatgtacgcttgacaatcataagttgtccgaaagtccaaaaaacaaccataaggtgtccttgagttccagcgacacaatgtttacactctctacaagacagcaacaagacagcaaccgaagcaagtaattaagaattttttattatttttattaatatttgagcttaagaagatagattaaaattatgtttgccaagcacaattgttaaaaaagggcatttaacgatatgtctaattataatgaactcgacgatgggttagaaatcgtaagtctcaagtcaccagaaactcctaaacgaagtcgcttgtttagtttagagccggttggaataggaacatcccaaacagaaagcttaagcagttatgtcaatcgattagctgaagcgcattgtgttaaatctcaaaaattaattatgctagaaattgctcctcaaattctggggaaagattatcaatcacctctacacagtaaagatgttagcagtttatttggtaatactgatgccaagccagcccttaatggaatgcgagatatgaagctattacttgttcaagcgttggagaagctaactcaacgtcaagatttaaaatatttaacttgtttaagttggaaagaggtaattaacaaaagagggttatttcgtcaatatcgtgcttggtgtcctcaatgctatgaacagtgtaaacaagataaagtaagcctttatgaccctttattatggtcatttaaagatgttaaattttgtctgcatcatcaatgtcagttagttgatgaatgccctaaatgcggttctcatttacctgtaattgctaattttttgccattaggacattgtttttattgcggagagtggttaggcgataataaaaataaaaatccaaaatgtaatttcaaaaattttccagaaagtttattgattatcaaaaatataggagatttaatagctgttactcctcggttagggtctcaaccaactcttgacgagtttatccaaaagttacagttaattttattttgctttgaaaaagttattagccaagatttgaaacacattaaagttttaggaaaaattatagagcatttaaagctgaatttaagtcagcatggagataaacccttaaatcttattaagataattattcctgtttgctctaaagcccatatttctgtatctgaactatttttagaagatttaactggtttgagtaaaattttatttgataattttcagattaattatcaacttccaattttatagtgacggaaaaatgagcagagaagagagaataagtaaaaataggtaaatattcggtcttccccaactcacttggataatatttctcaagctacttgatgatcgggaaaaagtgaggtaagatgaggcatttttagaaggtaaaatctatcaacctttacttaaattcaattatcccttttatagtttagataacgccattaggcagttagccatgatgcacaatggaacgggcaaaatgtaaaatgtaaacgaatccctgagcaacgccaataggcagtaaaccatgatgtactatgctttattttgctattgatagccaaggaactgttcagtattgagcaacgccaataggcagtaaaccatgatgtacgacgcggtttcagcaactgaggcgggttcagcaacgaatcaagcccgattttcttgagcaacgccaataggcagtcagccatgacgcaccgcaattttagaacccttgataaattagggttcacatttaattttacaagcacctttttaacagatatctagaagttacaaatattatcagtttctatctaatagcttgaatagtagtccaacaagactccggtggaaactctaccgatattttttttaacccgtacctcagccatctagtatttttagacccaacatggtcaacccaatagggtaaaataattaatccatcctcatcttgcattaaccaccatcgctcctcaaaacaataatcattcgatatcaactttatcttattaactaaatcattactttcccctaaatataaacaacccacacgcttaaccgattcaggataaattagtgcttgctcaattctttctcttaaagttggttgtgcttgctcatttttagaagctacccaaacgataaatttaatattcgataaaacctcttgatactcagggttagtatttctatcatcactaaaatttttaactttaaaccgtcttatcctccgcaaaacctttgagatttgtggctgagaaatcatagccatagccaactgcaccccacaatgcaaataaacatcccactctcccaccaaagatagtaacattccataaaccgttgcaggagggggaaccggataagttttgccatattcccggctgtgagattgacggaaactggcaaaagggacatctatatatactgctattgaggacataattttaataagggtaagatagctccaaatctttaacaattactttttttaaatcttctatagcttgctcttttccccgaaaaatatgagcatttttaatcttaagacctttagcaaccctccccccaatccataactccgaggctttgatatccccgacctcaatatcctcaagaacctcagatttcattttgggaattaaatcaccttcctcaaaacaataaaaaattcctggagtttctcgctgagtccaacaaagcacaaaactttcaggagtaaacttatagcagaatacattattatttcccccaactttacgaatattcattaaagcatcaataaaagctaaaattcgctctttcactttcaaatgattagggtctaaagcaaacgtatattgataacgagtattatggtattcaagaaaatgtaaagcggttctatctttaatttttccgcttttagcattaaaagttagcgctccagtataaggaataagagaaactcctcgattaactcctaatgcaccaagtcgctgaactatactaccttttgtttgattacgtcgttccttgccagtcgaagaaggttcttcttcttgtatatcttctttagctgcttcagcgtacatatagccaaataaatcatcatcaacaaattctacagggtcaaaattttcattgactaaatcattagtaaactcatcctcattccaacgtcgattaatcggataaccttctttttgtaaagtgtaacgtaaaccccaacgaatagcatcaccacttactaaagaatgaatgtgaccatcccagtaagttttttgtaaaggacttacattaccccgtgctttttcatgatttaaagaagctggcccataatgagttataactgttccaaataaataaaacatattactctccttctaattgatttttactaacaggtttataagtagctaaagcaaacaaggcaatatttcttgctttttgccaaggtacagattcagttatgaagggtaagacagaatcccattcgtcatataaagttgaaagaaaaccggctctagccaaaaaatcagccagaaaatcgctaaaagaatgctcatcataacatcgatttaattctcctctaatacgctcatattctcggtcaaatctagccctttctccctcttgggttcgtttttgtattttggcgtagtttctccttaaagcttcatgaaaagcttgcacaaataatttataatcttccatttctttatcctgctcaatcatggctattaatccctctttgttatcaataagttgctgtgccaattctccatcaatgtcttcttgattaagaattttccagaaatctgaccaccaaggtacacctttaactaaattatctgctattattccgcgaataaaattaactttaatccacctgtttttaccgtaactatcaaattgattttcttgaaaaaattgttttattaaaaaataagtatttaaaatatttagattaatggttatgtctctagtttcgattaaacttctttgatgagagtctttgttgaatttttcataaagtaaaacttgacaggttcgttcacatgacctttgggtttccacttcatgccagctataggtaattaaggcagcttctcctaaactcgatacatgataatttttataagctaaatttcctgactgccaacgttgataagcagcctcttctaaatcaagaatttcaggaataacaattaaatatttctccggattgttattgtctgttttttcgtaatagggatgaaaaataaaatactggcaaacaacagggacaaataataaaactaaggcaaactccggtttttcttggattttattatatttgtctagcatggcgtggcgaacggttgcccctaaatatagccaactaataatagagatataatctgttaatagttgtccagcttgacaaagttgtttagcaaaagtttgatgagcataccattttataggtttataagttagttttcgttgttttccctcaatgataatttcttgaactgtttgtttaccgtatttacaaaatttacaatgtctaagaaaagtggctcctatcgagaaatgcaaatgaatttggttaattagttcaattgatgggggatttaagcctgtcaaagtaattaaacctttatcgctaatctgaaaagattgttttaataaccagtctaaaacctcaaaatcttctccttgccagttgagactaatactatgagaagttaacgaccagaataaatgaccaggacgttgctattttcatctttttctgttgtttcacgccatgtaggaacaaacacaccgcacatcattttatgcttgccaccaatgccactttgctgcaatttaatagagtccttttcgctgagtttggtaactttcatcccaaatccccgcagccgaaataactgatgttttttcttaatggtaagcagcctacattgaacttcaccattagctcttgtcggtaattctatagttccttttattccctttcgattcagttgacgttgagcaacttctaaaactgcttcaggtgtttcggcacgatgaattaagaccaagcgagaataaagggtagaagctggttgtagtgcagtgggatagggaattcccagttggaacttggcttggtgcgaaactcgttctataccccagtcaatagtaatggtttgtcctgctagggggtaaaccaaggggatctggtcaataggcagccttatgcgaagtcgtgagcgattggtcaggcgaagttgattgaggggttgaggaattcctgctatcggatgaatgctgattgcttccatctcatgaattactcgacaatccaatttttcaaagaaattttgtttggttagaagattatttaattaaatgtcctaatgttgaagctcaagttactgatgccgttttagctatggtcaaagctaatcctgggatttatttaagcgaacttcaacagaaaatagaaatagcaagtattgatgattttcatgttttaattcttactgataaaatttatgttgacctatttgccattcctttaagttgtcctgagcaagtccaggtttttcttagcgcgacagaagcgtttacccattctcaactgacaactattgtcccttcaaattgggaaacttttaattctcccctcaatgtagcaataggtacacaaatatcttgggatggtcagccttggacaattgttaacctaggaaataactatgtaggacttcaaggagaaaataatacatttcaacatttacctaactcagttttttcaactctggttcaccaagagaaaattgtaggattatcttccccgaatttttcttcacttaatcctaaaattgaagaaatttttagttataccagtcaagccgaccttcaagaagctcatagacgctatcaacaaatagaagcttttttgaaaggtacggcttcaactcctactaatcgaactcaacggcgatggctggcaagttaccgaaaagctgaacaactttatggtagaggctttatcggactcattcctcaacatcgccacaaaggaaactctttatccaaaatggacaaagacgttcatcagttaatggaaaaacatatccaagaggaatatgaaacccacaaacagccatctattcgtcatgcctttcaagcttttaaagaattatgcgctcatactggtcttcggccgcctagtttagaaacttaccgtcgaagcatcagaaatcgcccagtggtagaacaagttaaaaaacgtcagggtagcagagcagcctatcaagaagaaacattctacgagtttcttgaccgaaatacaccaattcacggtgaacgtccctttgaaatagctcatatagatcatactttggctgatgtccaattactcagtcttataatgttaaaccttggtatggagatgaatgagggagaacatcaggctaatttaggtaaagcctgggttactcttctgattgatgcttattctcgacgtattttagctgcttatatgacttttgattctcctagttaccgctcaaacatgatggtgctgagaatttgtgttcaacgttttggtcgattgccccaaattttggtagtagatggaggccgtgattttcaatccggcaattttgagatgctgctggcttattctcatgtcactaaaaaggaaagagccaacacaagagatggtagtgtcatcgaaagtttttttggggtagctgacagagaattttggcataacctcaagggtaatacccaaattatgaaaaaagtccggcaagtcaccaaaagcgttaatcctaaatatcatgcagtttggacactagataaactctaccgctacttttgtgaatactgttatgaaatttacgacacttgcccgcatcctactttaaggatgactcctcgtgaagcttttgagattggtttggctagaggaggtttgcgcggacatctactcatcccttatgaagaatttaagctgttatctctacctgcaccgacggataacgatggaatgcgaagaattacccccaagggcatcaaaataaattatctctactatggtcatccctcgtttgagcgtgtaagaaatacccgtgttgctgttaaatatgaaccgtttgatgtcactatcgcctatgcctatataaaaggtgaatgggttcaatgtcgttcgggttatatacgagaactacaaggacgttcagttaaagagttaatcacagcatcggacgagttgaaaaagcttaatcagttacagaatcaacaatttagcgatattacaggcaaaaacctggctcagttttttactcgaattgagagggaagaagccattttaacaccctcttggcgcgaggcgaaaaaagcggttcaagctcaacacttacgagatgaggaacttaaagaggtattaaatgaaattgagggtaaaccttctacaaaagaaacttctaacgattcatctgagatagatttatttacttttgaaaatagggaatatatagctcttagttcctctatttctcctccttcaccgatacaacagacacaagtcgatgaagacgacgacaatgacgaattcgaggaactttttgaacctttggaggaatggtaatggcattgcaaggatttccccctgaacttctcaaccaatcgccacagaaacgattggattttttcaagagtccagacataacttttatgcacaagattttgcataaaacctacaatcagttataccgcaaagtttgtaagcctgctggagcttctacaattctccttatcggcccttcgggagtcggcaaatctactttaatggacttactcaagaaaagaatacttgaagaaagtcttcctcaaatggagcttgagccggcttggattcctatcatttgcgttgaagctgatgcaccaggaaaaggaacatttcgctggaaaaagttttatcaacaggttttgttagaagtcgatgagccaggaattaaatataaaatcgactataacaaaattaactatgaagaagaaggaatacgtcgcggtaataatggcagattaattattggagcgagagcaacagaagattctctcaaaatatcaatgaaacaagcactcaaatatcgtcatccttatacccttgctattgatgaatttcagcatattgggattagagccaatgaagatcttctcaaagcccatatggactgcttgaaatcagtggttaacggcacaaaaattcccttaacgggttttggaacttatgaattattggagtttttagagttaagtcctcaattaagccgacgcaccttaaaaattcattttcaccgctatcgatgggaaaacgatgatgagtgcaaagaatttaaacgggttctctataacctaattcatcggatgccttttcctaatcaacctaccattacaaaacaaatttgggaattttgttttgagcgcagcattggtaatataggcactttaattgattggctgactgatgcttatgatcttgctctggctaacgatgctccgagtctgtcgtttgattatctcaaagaaactgctaaatctagacttgattgtgagcagatgattgaggaggctattgagggtgaggctagacttgaagaaaccgaagattctactaatcgcctaaaagttttattgggtatgaaatcagcttcaaagccgtctaaaagcaatgctaattcaactgatcctaactcaactgcccaaaaaactaaaaaagatgttaaaaataaaccctttaaacgcaaacccgtccgtgaccaagtaggagggcaagatgaaacctgactcgtatgagccgctagagtggtatgacttaaaattgcttatcttacccaaatttctttatttgatttttttaaccataaactttagttcatcggtttttgcatctccagaaaatttggctaaagctcaacctcatcaacaaaagcgtatatcacctcgttcttgtgatttaaaccagattgaaaactttttgaatcaacatcttgaacaatctcctgatttaatttcccctcttacaattattgctaaaaatctcaaagtcgataaaaaatttatatctcggtattttcgagatttatgtcaaaaaattgtagctaaacgcttaagttataaaaaagattgttatttagattccttaaaacaatgttgtaatgaagttgaacaagttacaaagatgctgtttaaacagggagaatatccgacggaagactgagttgctcaacttatcaccaagcccagttattttcggtactctcaagtgcgtgaagtttttaacacaactcgacatgagttaggattaaaattaaataactaatttattcttaactcaagtgacatcaataacaacgataagttgtccaccttctttgacaacgataaagtgaccaatttggtcaacttatggttgttgtcccattcatctaaatcggtcgtccaaccgacataatgctgcgcggtatgcttgggagaaatgggacg

SEQ ID NO: 895 - DNA, 21990 bp, Planktothrix sp.
  source 1..21990: mol_type = other DNA
ccaaatgctagttgaacaagctgattattttgttcgggtagcaattttagatgctgtaatttaaactctggttttgccgttgtttaaagctaggttttgccgtcacctcccttaaaccctcttaactccgtttcctaaatattctatcgagacggctttttaaaccctgattttgccgaaatttcatttttcaagtttggcattgccgaaataattaagagttgttatgatgattttatcatcaaagttaaatcaattttagggaggatagccatgctctctgatactgaatttcaagcatggtgcgatcgcctgcaactctcacaacaacaaagagattgggttaaccaaattcgcacatctcctcccgtccgtaaggtcaaagggagttcaagaaatgttcatggcccttacgctagtaaaaaaatgggcagaacgattcaatttgaatcccacaccgttgaattacctgcgatcattcaattttatgaaaatgatgactcagttttagaatactgggatcaaccgattaaactcactatcaaatgctcacctcaaggaaaacaagctactactattgctcattaccctgatttctttgtgatgaaaaagaatcgctgtgggtttgaggaatggaaaacagagaaaaagcttgacacactaagcaaggaacaggcttatcgttaccaaaatttggaaggaaaatgggtagatatcattgttcaagaatatattaaaagcttaggatattattacagtcttcgctcagatagtgaaattgattgggtcaaatatcgtaatcagaagtatttacaaccctacaagcaaggatatttagatcaacaatacatccttgatgaacaggtagaattccatattaaagagattatcattaataatccgggtattaacctgacaaatctgattaaaaaagcgcaaaatgccagcattgacgatattaataccttaatggcgcttgaaaaagtttatgttgatttaagtgcagtagccttaatcgaacaagatagagtacatttattccgtgaccaagcaactgccgaagcatacattactgctacccatgattatagtgaacctgtatctagcagcgtgcagatagtcgatctcaaagtgggttcatcatttcttttagatggaaaaagcgtgactattgaccatattggagagagtaaaattattctcaaaggagaacaaggaattattcgttggactcatgcagaatttcaacaattagttgagttaggggaaattagttatcttcaaacaaaagaacagacaaccttagatgaggagggatggcaacaatactttatagaagccagccctaaagctttagaaattgctaatcagcgatatcaagcaattaaaccgcttttagatggagagtcttatgattctctggactgtaatagaccagaacgaaccttacgcgagtggaaagccaaatatcgcaaagcgaaacaagaacatggagttggtttagtaggtctaattccccaatataaaggtaatccaactcctcgctattctgatgaagatttagaattcattgataaggtgatagaagaacactatgaaacctttaaacaaaagaatgcttggcaaacttatctaatactaagagataaatgggaggaatcaggactcacttctccaattcctagccataccttttactatgaaaggctaaagaaacgaaactcttataaacaaactaaaagaaggatgggatctcgcgccgctaatagtcttttggggccttggttgattaaacccaccaccccccgtcatggagatcgccctcttgaaattgttcatattgaccatactcagcttgatgttcaatgtgtatgtccctacagtaagaagaacttaggcagaccttgggtaacaggcatgattgatgcctacagtcgtcggattttagccttatatctaactttcgatcatccgagttatcggtcttgtatgatggctatccgcatttgtgtgcaacggtttgggcgattccctgaatggattgttgtggataatggaaaagagtttcaatctacttattttgaaactttattagctcgatttgaagcaagtaaaaaacatcgtcccaaagatgttccgaaatttagttcgattattgaacgttggtttgggtcacaaaatacggaatttatcaataatttaaggggtaatacccaaattatgaagcacgtccggctcgttaagaaagaaaataatccaaaaaatttagcggtttggaatttagaagaattatatgattatttggcttttggctatgcttatggagtttatgatcgctcagaacatccggctttagaaggaatgtctcctcaacaagcctttgaatcacgattagctaaaacgggacatcgccctcatcaatatatcaagtatgatgagcaatttaaaattttaactttgcctaccaataataagggaacagctaaagttattccgggtaaaggagtaaggattaactatcaagattattggtcggatgaattttatagtgttgaaaatcaatctgttcccgtccgctatgatccgcttgattatgggattgcttatgcctatgttaataatcattgggtgaagtgtttatctaattattatatgaaatttcaaggttattcagaaaaggcggtagagatagcatcaaccgtttgcaaaagaaaacaacaaagatacaatcagagtcaatatgtgggagctaaagagattgttgacttgctgaataatgcagaagaacatgaagaaataatgctacaaatccgtcgagatcaatcggctaaattagtttataatttaatcgaaggaactcttagtagcgctgttttaaattcaggagatattaaacagccttccgcacctaagactaaagagattgaagagactattctggatagggaagaagaaattttacaacctagtctatccagagaaattaaccttgacaacattaaaccttttgctgatggggacttatggtaatcgctaataatcgtccgtttcctttagaaattcttcatgaatcaacggataacaaacttaaatactttaaagatgtgattgttcctcatcgcaatatcaggttgattttagaacagctactcaaaaatgcgatcgaaccggatgatgctttagtctatctggtgtttggggtaacaggcgtaggtaaatctcgattaaaagcagaatttgaaaaacgattacttaaacattttcaagatgaaattatttccaatcctgggagtttaatcgtagggggaatcgaggtagatagtgctgaaggagggaagtttaactattctgattactatattcaggtgttggagtctttgaaggaagttttaattgattataaggaaaattatggaattgatttagaaaacgataacgaagataatttaaaaggagatcatgaaggaaagaatgctaaggctttgcgccgaacaatgcaaaaagtttttctacaccgtcagttaaaggcttatacccttgatgaagcacagcacttatttgatgtagcaggaggaagacaaattaatgttcaaatgaactggcttaaatcaattgctaataaaactcaaaccgttcatattttatttggaacctatgagcttttaaagtgtcaacaagtaaatggtcaggtaggaagaagaagtgaagattattatttacctccctattatctaaataaagtagaagatcaacaagaatttattaaggttattaagacattacagcagtatttacctgtggaaaatgcaccacaattagaagagaattgggaatactttatggaatactcgataggatgtgtaggaattctcaaaagttggtggtatcgcgccctcaaaaatgcgttagatgatcaagcaaaaacagtgagaatgaaagattttaaagcgagggaattatccgcaggaagacgaaaaaagattaaagaagagttagaagcaggagaaagacttttagccagtttatataatgatggaaacctcaagaaaattgaatctactgctagttcatcgcccaagaaaggtcgaagggttggggagcgtaaggtaggtagagacttagtaggaatcaatcaagaaggatgagtatttactcagagctttggagtccaaaacctttagaaatcccccaacggagtcggttattttgtcttgaacctattgcagtaggaactccctacgcagaaagtcttagtagttatatcaatcgtttggcgcaggcgcattgtttaacttcccaaaagctcgtgatgggtgaaattgcccctcttatccttaaagatgaggatcaatctgagctattgtcaaaaaatctcagtcacctattgggaaatagcgatgctaaaccagccatcaacggaatgcgggaaatgacggaaaagttagtaactgtcttagaagagttaactaggcgtcaggatttacgttttttgactcttttaagttggaaaggaatgattcatgaccaaggattatttcggaattaccgcgcttggtgtccttgttgttgggaagtgtggaagcaggagaagaagacggtctatgaacccttattatggtcatttaaggatgtagaagtttgtttaattcataaacagcgattagtagaagtatgccctcattgcggttccagtttacctgtaatggctaggacttcacctgcgggattttgttctcgttgttatgggtggttaggacaggaaattaaaggtgaagaagaaatagagaaatatcgagttaatattcaaggaattagtgaattaattgtacttactccccaattagaatatcaacccatcccaattgagttaacccgaaaattacaattaatttctttagtgtttgaacaagcgattgagaaagatttgaagttcttgggagaactagggggaatcatagaatccttaaagatagcatcaatacaaaatcaaaatcaaccttatcatttggtgaagttgattattcctgtttgtgagaaagcgaagattagtatatcccagttatttttgttaaattttaaaaattttgtagagatattgtttaagaattttgctattgaattaaagctgtaaaaattagggaattctaaaaatggttaattgtttatttttgtagcttttatagtacatttgttttaattaaggtattataaatattatagtgtttagcatatttatttagtgaagtttctggctttactagagcctgggaaatttgtccagattaaaagccttatgtcaacagcccgtcatgttattgcgctcttaaaaagctacctagaaggtgaggagcagcattttttttctgttgctctacagatggctgcacatgaagtacgacaaggacataccaaaattgctcaagagatccaaagcctggttgaccaagcaaaagaacgtaaatctgctatcgaacataaggctttgcccacgtcgctcgtccagtccaaaggagaattagtcaatcttgtatcagtttcttattcagaaaccaggttgactgatatggttcttcctgtagccttaaaaaaaagattagaacgtattcttatagaacagacccagaggcatcgtttagccgagtacaatcttaagcctcgtcgcaaaatacttctggttgggccaccaggatcggggaagtcaatgactgctgctgctcttgctggagaactgaaactcccgcttttcactgttgcttatactggattaattaccaaatacatgggtgatacggctaatcaactcaaactgatatttgatgcaatggctgtaacacgaggcgtttatttttttgaagaatttgatgccattagttcagaacgggctgcggttaatgatgttggagagctccgtcgagttctaaactcctggttgcagtttttggagaatgataatagccagagtctaatcattgctgcgactaatcatcataatttattagacaaggctctttttcgacgttttgatgatgttattcaatacgacttaccaaattcagaagttgttcgcaatttactagaagcacgtctagctctttttaatattgagtggaacgattggcatcatattattgaaactgctaatggtctaagtcaagcagaggtagttcgagcagcagatgaagcagctaaagcagccgtaatctccaaacaggattcaatatctgaagagaatatgatttgcgcgattacagaacgcaaaaaaactatctttcagtaaatgggttattccctttataataggtgttgaaaatgactttatagttcaatggtaaaataccagaggaatctccctaatttttatattgtagaaaagggagatagccaaaaatatacatctcgcggtggcggcggagacgggaagaaatcgcttccaccccgcgatcgcatacaacacgctgaaaggttgcaagaagcttttgaaaaagctctggaaaattatcagcaacaaaaattagtgcgcgaaccagaacttgcagttggacaatctggtttttatttagagttacagctacaaaaaagtgaactgaaagcggttgcgtcattggaaaataagcttaagaaaatcgagttgcttgcagtccgagcaaatgatgaggcagaggaaactgtatcagcaaccgtatttgtgccagagaaggcatcagattttttttcttccaggatagaagcttaccgcgatcaggaaactataaagggtaatccgaagaacgagcagttaatcgcaccattggaagaaattaacttaggtacagtgcgatcgctattcacagacaatcttgaatttccatctgaatatcagcaagtatggtgggaagtttggttacgtcagggttgtcttgaatctttccagcgaatagctcaaatactggagattaggataacagaaaactccattagtttccctgagagagaagtaattttagcattggcaactgtaacagatttatcacgaattattaacaataatggtttgattgccgaacttcgccttgctaaagatttaccttccatattcttggaaatggataaccaagaacagattgactgggtaaaagagcttgctcaccgcactatcgtgccatcaaataataatttagctatttgtttgttagatagcggtgtcacacgctcccatcctttaattaagtcagcccttgctcctcaagatttgttgacttgcgatccaaactgggtactggcagacaattgtgggcatggtactgaaatggctggtatagctctgtatggcgacctttgtgagccattgataaaatcaaacagggtatatcatctaacccactgtttggaatctgtaaagatacttccagaccaaggacaaaacgaccctagactttatggagcgattacacaagaggctgtttctcgtgcggaaatcaagaacccgaaacgccagcgtgtaatttgtatggctttaacgagtgaaatcaatagtaatgccggagttccctcttcttggtcggcagcagtcgatcaaatctgctttgaatctcaaagattaatgattattccggttggtaatatcagaggggacattatgcttagtgaatatcttgataaaaatgatctaagcccagcagaaaacccctcgcaagcatggaacgcacttgtagtcggggcttataccgataaagttaatatcatcgatcagaaatatgctggatggcaatctattgctcctgcgggcgacctttcacctcgaagtcgaacttctcttttgtggcgtgataagtggcctatccgaccagatgtgacttttgagggcggaaacctagcaacagatgatcctaattatccagggatggatcttgatgatttacgacttttgacaacgtattatcaacccaatgtacgcccattcaacctctctggagacaccagtgcagcagcagctttatgtagcaatatggcagcacgtatttgggctaaacatcccgaatactgggcagaaacagttcgtgggttaatcgttcattctgcggagtggactcccgcaatgcttcataatttgcctaaaagtccttcccaaagggacaaagtatcgatactactgcgtcgatacggttatggtgttcccaatctgaatagggcaatttttagcagtcaaaatgacttaacaatgatttgtgaagatgagttccagccttttcataaagttgatggcgaagtaaaaacaaaagaaatgaaccttcacatattaccctggccaacacaagagctagaagagttgcgtgaaacaaaagtcgaaatgcgggtaacactttcatactttatcgaacccaaccctggagagcgaggatggttgaataaacattcttacgcttcgtatggtttgaggcttgctgttaagcgttctaaagagtctttaactgcttttaggcaacggattaataaggaagcgttaaaaactgaagagaatgttccatctactaaaaataaagataaaaaagatcaagatactggatggtttctagggcctaagacatggaatcggggttcaatccattctgatatttggcaaggtactgcggctgagttggctcagaaagacgctattggcatataccctgttagcggttggtggaaatataactcaaggtgggaaggatggaataatactgctagatacgctctaattgtttcgatccgagttgtagatgaagttgaagttgatatttatactcctatttctatttccaataaaattaagcagactatacctattaatctgtaggtttcactgataggcatcgcatccgcatcacacagctaatacttctcgtgctgcaacttccatcagtttttcgctgtgcgatcacacttccttcagcttgccttccagcgcatcacagaggacagacgatttaaatctgcttgttatgtcttagtaactacacttttacagacagggcaacgccatatcgggccaacgtcattaactctgattaatttctgattattgtcataacaacctgtgcagtaagggccatcgccgtcctctttgtagtaaccaccctttttaacagtcagcttaatttcttcttggccgtctgctaatctctgctcaagttctgtaatcctagctttgagtgtagcgttctcttccttataattagaaacctgttcttttgcatctaaaagtgcgtcttttgcctctaaaagttgttctctaaggttaagaatcccttctcgcagctctaggttttgagttttgactgccaaatcaccaagctttttaattgcatcgatacctgctgacacgcccataacggcttttgaaatatctgttgacattaagttaattcctttactatgtgttatggcaatccagcatcttgctatcccaatatccaccctaagacggactcaaagaaggtcttagggtaacaaggcaaggtagtatgtaattaacgccagtgtttagttgggtcagctaacttaaaaccataaccagaaggaacgggtggaaaaggttctcccttaacaaccgtaacttcacggccaatactatatccttgctgattaactacagcatattggccacttgtgggtacgatttgacctgatctataaatcatggcaacattgcctccatataaattacaactagagcatgagcttagaggtcaagctatctcatgctcctctcatatactaacaaatgtattcagttttgtgttttgaatacttcattgattgatcggttcattagaaaagagataatggaactgactggggcgacctccaatcagctacaatctcttgagcgtgctggattggttgtgccagagagaatatggaatgggaagaagaaacctgaagtctattacacttgggaacaacttctagatatcaaagctattcgagacctgcgagaaaacacctcgctccagatgatccgcagagtcttagattactttgacaagtgcaatatagacgggagcttaagggataaaaggattgttgtggtaggtgatgaagtcttctggataaaagaggacttgtcagatctgggctatcaaatctcagcattaaaagtgggagacaaacggaataaagggattgggcaatatacgttgctagtattacctgcttttcaggaagtagtagacgatatatgggatgctgctgagaactctacagtaattgactttggagagtttagaaataaagctaaagctgaacgtagtaggaaccccaaagcttcttagtctcaatgagcagcagactgttgccataaagattcattcaactaaagccaccccacgaggaggatgacgagccatataatgccaaagtggtattgtattccgagtaggttggattcctactgattgcgatcgcctttctaaaacttacactaaccatcgcactccccatcaaacagccaacacttcccgcgctgcaacttccatcagtttttcgctatgcgatcgcgtttccttcagtttgccttctagttcatcgcagagtgacatcaggcgattaatttccttcataagttcgtttaaatttttagcgcaactaaccctagacttaatggtacttatagtccgtagacttataggactcagggaaatattctaagcaatcagacacaagataactagctattaccgttttttatcgtgctagtggtcttaagtttaataagctatgaaaaagaaacatccttggttagttgacatcggtaaaaatataagagctattagagaatcgaaagggttatctcaagaagagcttgctgagttagtagagatagaccgaacttatataggaggtatagaaagaggagagcgtaatgttgcctcactaaaccttattagaattgctattgcgcttaataccgaagttggaaacttgtttccaagactagatatgcttccattgatttctaggtattaagtcatgaccagaactcctccagattctctgatccagttagttcatcaaactatctcaaagctactggaagataatccagcagcaacttcatcggaagcttatgtccaacattatatgcaatttgaaataatccgagcaaatgtcactcctcggtattatcttcgcattggtattaattatcatggtcagcaagttcaacatatccgaattgatagttcgacaggtaggttaataggttggaatccttcaggagatgctctcggtacaagaaaaaatgcaaaagttcaacttgcaaatgtaacaatttttgatcgcgatccacatgaaccaatgatgaatgatgctaaaattggtggaggtgagattcctgaacataaatatatccgggttgaatttaaagctcgtggttggttaggacaaacaaaaaatcttgctggtaaagagcttgaaaaagatttagatttgttaaaagaagacaaggcagatttgctcgttatttgtctctcggaaactgctcatcgcaaatggagaggcgagggaaaggaacatcaaatgaaaaaaagaactggtgtagagagatttaaacagattctagttgatgtaaatcaactttcgggaacaaatattctcaggcagaagattacttttgaagatcaaagctgggtgatttctactcaaaaagtcattggttctttgaactctattatgcctggggctgaacattacataacactttgctggactgaataaagatagattttaggtcagagatttagaagttttatttattaaagcttcggctaaacgttcctgatgaatttttacctctgtcattttcgcttcaaaagtattgcaaagtgacataaggtaatcaactctttcaacaatacgcttttgttctttaaggggggggatagggatcataattaaactaaattctttacctgatatctctttaaaagtggttccagaagcttgataatctatttctctagcagcgaatttcaaaaagtaataaatatattcgctcatctctaaacagaaaggaacacatgatttaaacccctgatttgtagacaaatcgtttttagcaatggcaacataacctataggcgcacggcttgagaataccacagtacccgttggcattagctgtgctgaactcttttgcaatcctaggagagaaatatcttttttcccccgactaacgaatttacctgataatccatataagtcagatggagttatccaaggaatgtcatgatctgcgtagtattcagattgatccgtttttggagtgcctccccctacaacatttccgatatctccaatacgcacccatttccaactatcgggaatcttgaatggtatttcagttggcttgatgccgataacgggatatttgtctctaatctttttctccttaattaaacgctctttttcagttcggattctctctagcagtatagaagcaggttcatcattaggatcttgacgaacaagcttaccgcttacagccaattgcagaataagttcccgcaacttaacaacagcattcggcgcatcagttaataattcaaaattactaaaaaaactttctattttcatttgaacggattcacaatttcaagttgattattaataactaacccatcttgcatatcttgagaataaaggatactagcctttgcagacaaggctgtagcaataataaaactgtcccagaacgaaaaattatgctgaagtcgcagactagaagcttgtttccaagtagcaaccgttaactataggttttagtcacttgctcaccattctttttcatcactcatccggcattaatgcctccattaactcaaacttcagtttactccgcacctcattcaattctaccatcagttgttgatgatgcttgagcatctcatcgagatcagtgtgttcaatatcaacttggtgagggttcttaatatccaagttgtagttatttgccttaatatcctctactgaaacctgccaagcaaactcattttcctctcgattatcccaccaattttgctccggttgaaactcctcaaatctaatcggtttagttttcgagtaagacttgtaacccagtgggtatgggtgttcataataccagattttttccgtcggttcacccttagtaaaaaatagtaaattcgttttaatccccgtataaggattaaataccccattcggtaaacgaacaatggtatggagattgcactcttgcagcaacttttccttaattcgggttttcaccccttccccaaacagtgttccatcgggcagaacgatcgctcctctccccccatcttttaacaagtgtataattaacaaaaggaacaaatccgccgtttccctagtgcgataactcgccggaaaattgctctcaattccatcttcttccatccctccaaagggcggattagtaataatgacatcgactcgttctttaggactataatctcttaaaggccgtgccaaagtattgtcatgttccaccgaaggcagatcaatcccgtgcaagatcagatttgtcatacacaggttataaggtaagggctttttctcagttccccgaatattacgctgtaatattcctggcacatcagcactattaaaatgatggcgaatatggtcaattgcggcgattaaaaagccacccgtcccacaagccggatcgagtagcacttcccccaattgaggattaacgcgatcgactataaactttgtcaccgcacggggcgtgtaatattcccccgcatttcctgcactttgtaaatccttcagaattttctcgtaaatctcgctaaactgctgcttttgtaccgacttattaaaatcaacctcattcagcttgttaattacctggcggatgagagtgccatttttcatgtagttataggcatcctcaaacaccttcccaatcatccgtccacgcggatcggtagaggttcttaaatccttcaggcttttaaacagcgcattatccacaaaatccagtaaattaggcccagtaattccctcatcatctgccgcccaattccgccatcgcaacccctctggaatcggcgatttataattgtctttcagcagttcgtattcctcctcacgagagtcaaacaccttgaggaaaatcatccacaccaattgactaatgcgctgggcgtcaccatccacacccgcatctttccgcatgatgtcttgaatggttttaatcgtcgtgctgatagacatctacattgcctcatagagccgaatctttaattctgccagagtttgtaggtatttgggctttccgccaaaaagacttaaaatttctaaaggcgtccccatgtcgcttaacggcttcaccttgagtacgtccatcttctcgatatcctcaacgccctgatccgtatatttctctaacagcgcatccagcaccgcccgtacctgttccccatacttattgaagtaatcccgctttcgcacgttattcgctcgttcccgtcgagttaggggtggctgatcaaagactacatgacaaatcaaatcaaatgggtcaaactccttccctacttcattttctaatgcttccagcagtaccccttgttcctgcaactcctgaataatcacttgtttctgttcgatgctattccatttcttcagaaacgcatccaaagaagtatactgtttgcgaacggtttgccgcgtgtaatccttaatggattctgtaatcagcttgccttctttgctgtaatattgttctcgaatgagtgcgatcgctacatccgtatcagccaccacataccgttctggctttgctttacgaacgatttccctatcaattacttgtacctcatcttcccctggttctggtggcacaatagggtcagttggtttaggttcgtaaatctgtacggggtcgccatcaaaatcacgatcagcaaatagttctgtcgccttcttaaaatccataatcacaaaaaacagcttgccataatcctcatcaattctggttccgcgtccaataatttgtttaaacttggtcatggactgaatacgccgatccaaaacaatcagcttacaagttttggtatcaactccagttgttagtaaatcagacgttgtaacaatggtcggatatcgactttcggggtcaataaaattatcgagttgtgctttccctacttatctcgttgaccaggcttaggtttccatccctctaaatctttatctaaatcaatgcgaataaccttataaggagccaagaagccatcatcaatcccctgctttagcgaataagtataaatcggtttaccaaaataatcaatattagaaacatcctcagtttctttcggagttgctgttaaacctatctgagttgcattgttaaaataatcaaggatttctcgccacgccgaatcatcagaggcacttcccctgtgacattcatcaatcacaattaaatcaaagaaattcggcgaaaactgcttataaatattcttatcttcttcagttcccgatactgcttgatataaagctaagtaaatctcaggggacttattcacctgtcgcttctgaattttagtcatcactgaaccaaagggtttaaagtcattaattctagtttggtcaattaaaatattccggtcagctagaaataaaattcgctttttcgtcttagacttccacaaccgccagataatctgaaacgcggtaaaagtcttccccgtccccgtcgccatcactaatagaattcggttttgaccttttgcgatcgcctcaatcgtgcggttaatcgcaatctgttgatagtagcgtaacagcttattatctgaactggggtaataatcctgagtaataattggctcaatttccggtttaatatccttccaaacacaatacttgtgccaaagttcctgctgtgtagggaattgatcaaggggtatttctcgctctcgctttccggtggtgatagtgcgatcgcaaaacatgaacccatcaccatttgagctaaaaatgaatggtacatcaattagttcggcggtggcgatcgcctgctgcatcccatcgctaacgccgtgattattatccttcgcttcaatcaccgccagtgaaataccaggcttgtaatacagcacataatctgcacgtttttgctcacctctagtcgtaagctttcctctaacaattacccgacctttggtaagcgttacctcctcccgaatctgagccatgatatcccaaccctgactggtcagagcaggtgtaatatacttggtacagatatctcgttcgctcaagagccacgaatcacaatccctggaatcccttgatcaagagcgtgggaaatctgagcaacgcctaacggcataaagccacgaatcacattaatcggttacggagatcgggttcagcttcgatctgagcaacgcctaacggcataaagccacgaatcacagcaaaggtgaaaacccttggctgatgaaggctcatttacaatcttacaagtatcttcccgatagagaacccgaaaacacaaaacttaccaaaatctcctttactttcagcccctcaaaccctctccccataaaccttttcagaaatagcaagcaccttttcccttaactaaattgctatatccattaccctgtaacacttttagccattcttgtaccttcaataccctttcccatcagagatacttgtcaaatgggagatcgaatcatcgtccacgctaaatcaggaggcgataaacttgacctttcctcaatcttatacctcaaaaatcgggtatttcttgaccccacatggtcaacccaatagggtaaagttaacctgcattgattatccttaatcacccactgtctcatcccttctaaataatcttccgagacaagtttgatcgttttaatcaactgatcactttcccccagaaataaacagccaaatcgttgcactaactcaggacggtcaaacgctaactgtagcctctcccttaaacttggttgtattttctctccctcagaacgaacccaaatcaaacactttagattagacaaaatctcttgataagcgggattaacattctctggctcgctaaaattaagatttttaaaccgtctcatttgacgcaaaattcgagactttctggggttggataacattgcgatcgccaattctactccacagtgacgataaacatccgtttccccgaccaaagacaacagcatcccatacaccgtcgctggaggaggaacaggataagttttccccatttcccttgcgtgggactcccgaaaggtcacaaacggaacatccaaatagagaattaatggtgtaatcatttgggttcttctaatcttaaatctcttttaataactgtttttaaagcatcaatcagttcatttcggttgcgatgaagatgcaccttcttaaaaggggaattatcaaaatcagccaactgttgtaactccgcaacaattggccctccaatccacaattcatcagggtcaatttgtccgcattccacttcgtccctaaactctaatgaagtgatgtactatccttttctctgccacttttggcccctagctttaatgtgccatcataaggcgttaacgaaacagccatattcatacctaacgcacccattcgctgattaggactgctgagttttgcctttttctttcttgtttttgttgttacagtcccttcctctgtttcagtagactccaataaagcaaacccgaaaatatcatcatcataaaattgctctgggtcaaaatcttcacttgttaaccgattaatatgttcattctcatcccaaactcgattaactaaataaccttgcttttgaagataaaaacgtaatgcccaacgaattgaacttgaacttacaaaagaatgaattttaccattccaatagcctttttgtaggatagtcttattcccttgtctcatgccatgatttaaggacgctaaaccataacgagtaagaactgtcccgtaaagataatagtttggcattctatcgtcattattattctgattcatcactaacttcttttagatcttgattatttgtagatgaactattttcagtatcgttgggtttctccttgggtttataacttgcgatcgctaacagcgaccaaattcttaattcttcccaatgtgattttttaattagtagtagaattgactctttgttctcattaaaatacttgtttaatcctcctcttactaaaaaatcagataaatattgctgaaatgacaatttatcataacaactgtttagctctgcccgtaagcgttcgactttcttcttaattggaggctcttttccttcctctgccttggcatacatcttagcaaagttgcccttcatcgcttgctgaaataccttaacaaaagtaagatattgttcgtcctcttcactattctctgccatcattatgactcctcctcgattgtaaagtaactggttaaataaatatccttttgtatcctctataaccaatttttcccataaatcagaccaccaagggattccttttactaagttttcagcaattagtgatcgtatgggatttactttaacaaaaattttctgaggttgaatcttctcataattgggttgaaagctttgttgaacccgttgataggtgattagagtattctgattaatttcaatttcttctatactcatcaacgtccgttgatgagaagattgattcattttttcatataaccaaacttgacaagcttgatagtagtcgccttcaggttgaatattgtctaaactgtaataaagtaaccctgcctcgccaatgctactaacatgaagctgtttagtttctaattgctgtaatcgccatctcctttgggaagcgtcttcaaaatccttgatttctggaatcaccacaaggtagcgatggggtttcctttcctttaggtcttctgatggaagatgaagtaaccaatattgacaaataactggtacaaataacaatgctaaggcatattcaggtttctcttccagttttgtcatattttgcgctctggcatggcgtacaattccccctagatataaccaactggttatttgaacataatcctgtttcagttgttgggtatctgtttcacataacttatccgcaaaggtttgatgtgcgtaccatgttagggatttatattgatactccactttttttccttcaaccgttagttcggtctttacctgcttccctgctttataaaacttattaagacgcagaaaaacagcacacattccttcatgaatctggattttctggcttaaatctgccgcatcattatctaatcctgctaaatgaattaaacctgtatcatccagttgaaaagactccttaaataaccatgataatgcgacaaaatcagttccctcccagaataattcaatagtatcagcagtcaacgaccatgatatatgtgctccacgttgatgagacgagggatattgcgcttctaatcgctttaaagtcatgtaaagtcccgttattcctgcgcggtgcattattgtcgtatccgaagcatggagagatagggaaattttgggttgggtagccactatcattagccttcctcctcttccttgctacgagtcgccgggacaaatattccacacatcatctttcgttttccgccaattccctgttcttgcaacgttaaggaatcttctgggctgagttcactaatttttacgccaaatcctctgactttaaactgtttcccttgtttattgatggtcaattgtcgtcgttgaggtgttccatcttgtcgggttagaagttcaatctttcctcgtattcctaaattatccagtttgcgttgaacagcttgaataaaggtagttgggtcttgataccctgtaattacaactaatcgagagtagaggctttctgaggaagttaacggtttataatcgggaatatctagttgataagaatgttgacctagttgaaaagtttgacccgttaggtaagggtagattaaaggaatttgttgatgatgaatccgaatttttaaccgagattgagcagtgagttcaaggaaattgttgctggttggtattccggcaataggatgaattccaatagagtcgagtttatgaagggaaggacaaatacgggacacggcagcatagataggataaccattatccagaggaatcggtgcgccttttagcttaaagcttaggtctaaatattcttcactgttaatagatacagctgtcatagatgaagtttttcggataaaaaatttatgattaattgcatcaaatcgctaataattcaattatcatagtatataataatttacttttacagtttagaactatccctagtctaatttttaaggaaaattttaagttttttaactaaaaattaatggtgatggatattaatgtagccgaaattcaaccctacactaatgatgagctatggagtccagagaagtttcctatgccgccccgaagttctctgcatcatttagaaccgattggtgtgggcactcctatggttgagagtttaaccagctatatgacaaggttagctcattctcatggagtttttgtcagtacattattatcgagagtagttaatcccctgttacaacgaacttttatcaaaaattatacgagtaggggattagaacccttttttaaccgttctcacactttaaatggatatggaacaatagctactgactttattgaggttttaaatcaattaactttgtctaataatttaaagtttttaacattgagccctttctctaatattttggtgacaaaaggcttattgcgtccttataaagcttggtgtccaatatgctataaacgctggaaacaaaatcaagaagttatttatgagccactgttatggtcactcaatgatgtcaaggtctgtttaatacatcaacatcctcttgtgcaaaattgtcctcattgtcatcgtcaattactttggttaaattggaaatcgagtttaggctattgttcgcaatgctctcagtggttaggaggatcttctaatacttcaattgtaactcagcagagatggatagccgatactttgggagaattggttgctaatgcagatcggttatcttctgtactgactcaagagcgtatacaacaatctttgacttatatagtgcatcaagtttctgaagacaacatcgctgcttttgctgcaatacacaaaattcctaaaaatactttttgggggtggtactcaggtaaaaaccgtccccctttatctgctttaacacaaatttgttataacttaaaaatttctctatttcagtttttgacacaagatttcaatctatcggctatcccagatcgagatcagaaggttgagatggaatattgcaagaatacgcgatcatctgctagaacgcttgatttcaatcatattgaaaataccctgagcctgattttgtctcaagcaggagagtctttaccaacaattgcagaaatagcagaacagttgcagattaatagacgacttctttcaaggcatttccctgacttatgtcaccaaattgtcacgaaacgtcgcaattatgttcgtatgagccacttaactgctattgaacactgttgtcaagaaattaaagaggcgatcgccttactccatcaatcaggagaatacccaaccgagtcccgcgtatgtgaactgattagtaaccccggctatttccgttatcagaaggttaggctactgtataagaaagaagttcaatccatgttcagtcgcttgtaagctctaagtatgagtaaggaaggctgctcatctacaactattgctccttagcatttttcaggcatggttttgccgttacagttttcaggcatagctttgccgttacggcaaaaccagagtttaaatgacacatgcagaaacagcttaactcttaataatcaatggacacaactggactcgaaccagt

SEQ ID NO: 896 - DNA, 9960 bp, Gloeothece verrucosa
  source 1..9960: mol_type = other DNA; note = PCC 7822
tcttttaatggctctttctaaagagcgaccaccagttaaaacttcaacaactttaaagggaatttctctctcggcagctacctgacaaaatctcgctcccgtcccttttctttgctctctaattctttcattgggacaacaaccataaagtgaccaaactgacaactataagttgaccagagcaattgtcacttaaaggataaagtggccgcttttaaagcataaagtgaccgtccctggaatttagagtaaaagattgcctataagcataattaactggctttagtttttaagaaagagacgatcaccttttgttacggaataagttctagcgcccttgtagtttaggttttagacagcggccactttatcctttaaaaacggccactttttactttaagtaacagcaatccctgaaatgcttagtttttcgttggcgaattcaattgaaaatgtacgcttgacaatcataagttgtccgaaagtccaaaaaacaaccataaggtgtccttgagttccagcgacacaatgtttacactctctacaagacagcaacaagacagcaaccgaagcaagtaattaagaattttttattatttttattaatatttgagcttaagaagatagattaaaattatgtttgccaagcacaattgttaaaaaagggcatttaacgatatgtctaattataatgaactcgacgatgggttagaaatcgtaagtctcaagtcaccagaaactcctaaacgaagtcgcttgtttagtttagagccggttggaataggaacatcccaaacagaaagcttaagcagttatgtcaatcgattagctgaagcgcattgtgttaaatctcaaaaattaattatgctagaaattgctcctcaaattctggggaaagattatcaatcacctctacacagtaaagatgttagcagtttatttggtaatactgatgccaagccagcccttaatggaatgcgagatatgaagctattacttgttcaagcgttggagaagctaactcaacgtcaagatttaaaatatttaacttgtttaagttggaaagaggtaattaacaaaagagggttatttcgtcaatatcgtgcttggtgtcctcaatgctatgaacagtgtaaacaagataaagtaagcctttatgaccctttattatggtcatttaaagatgttaaattttgtctgcatcatcaatgtcagttagttgatgaatgccctaaatgcggttctcatttacctgtaattgctaattttttgccattaggacattgtttttattgcggagagtggttaggcgataataaaaataaaaatccaaaatgtaatttcaaaaattttccagaaagtttattgattatcaaaaatataggagatttaatagctgttactcctcggttagggtctcaaccaactcttgacgagtttatccaaaagttacagttaattttattttgctttgaaaaagttattagccaagatttgaaacacattaaagttttaggaaaaattatagagcatttaaagctgaatttaagtcagcatggagataaacccttaaatcttattaagataattattcctgtttgctctaaagcccatatttctgtatctgaactatttttagaagatttaactggtttgagtaaaattttatttgataattttcagattaattatcaacttccaattttatagtgacggaaaaatgagcagagaagagagaataagtaaaaataggtaaatattcggtcttccccaactcacttggataatatttctcaagctacttgatgatcgggaaaaagtgaggtaagatgaggcatttttagaaggtaaaatctatcaacctttacttaaattcaattatcccttttatagtttagataacgccattaggcagttagccatgatgcacaatggaacgggcaaaatgtaaaatgtaaacgaatccctgagcaacgccaataggcagtaaaccatgatgtactatgctttattttgctattgatagccaaggaactgttcagtattgagcaacgccaataggcagtaaaccatgatgtacgacgcggtttcagcaactgaggcgggttcagcaacgaatcaagcccgattttcttgagcaacgccaataggcagtcagccatgacgcaccgcaattttagaacccttgataaattagggttcacatttaattttacaagcacctttttaacagatatctagaagttacaaatattatcagtttctatctaatagcttgaatagtagtccaacaagactccggtggaaactctaccgatattttttttaacccgtacctcagccatctagtatttttagacccaacatggtcaacccaatagggtaaaataattaatccatcctcatcttgcattaaccaccatcgctcctcaaaacaataatcattcgatatcaactttatcttattaactaaatcattactttcccctaaatataaacaacccacacgcttaaccgattcaggataaattagtgcttgctcaattctttctcttaaagttggttgtgcttgctcatttttagaagctacccaaacgataaatttaatattcgataaaacctcttgatactcagggttagtatttctatcatcactaaaatttttaactttaaaccgtcttatcctccgcaaaacctttgagatttgtggctgagaaatcatagccatagccaactgcaccccacaatgcaaataaacatcccactctcccaccaaagatagtaacattccataaaccgttgcaggagggggaaccggataagttttgccatattcccggctgtgagattgacggaaactggcaaaagggacatctatatatactgctattgaggacataattttaataagggtaagatagctccaaatctttaacaattactttttttaaatcttctatagcttgctcttttccccgaaaaatatgagcatttttaatcttaagacctttagcaaccctccccccaatccataactccgaggctttgatatccccgacctcaatatcctcaagaacctcagatttcattttgggaattaaatcaccttcctcaaaacaataaaaaattcctggagtttctcgctgagtccaacaaagcacaaaactttcaggagtaaacttatagcagaatacattattatttcccccaactttacgaatattcattaaagcatcaataaaagctaaaattcgctctttcactttcaaatgattagggtctaaagcaaacgtatattgataacgagtattatggtattcaagaaaatgtaaagcggttctatctttaatttttccgcttttagcattaaaagttagcgctccagtataaggaataagagaaactcctcgattaactcctaatgcaccaagtcgctgaactatactaccttttgtttgattacgtcgttccttgccagtcgaagaaggttcttcttcttgtatatcttctttagctgcttcagcgtacatatagccaaataaatcatcatcaacaaattctacagggtcaaaattttcattgactaaatcattagtaaactcatcctcattccaacgtcgattaatcggataaccttctttttgtaaagtgtaacgtaaaccccaacgaatagcatcaccacttactaaagaatgaatgtgaccatcccagtaagttttttgtaaaggacttacattaccccgtgctttttcatgatttaaagaagctggcccataatgagttataactgttccaaataaataaaacatattactctccttctaattgatttttactaacaggtttataagtagctaaagcaaacaaggcaatatttcttgctttttgccaaggtacagattcagttatgaagggtaagacagaatcccattcgtcatataaagttgaaagaaaaccggctctagccaaaaaatcagccagaaaatcgctaaaagaatgctcatcataacatcgatttaattctcctctaatacgctcatattctcggtcaaatctagccctttctccctcttgggttcgtttttgtattttggcgtagtttctccttaaagcttcatgaaaagcttgcacaaataatttataatcttccatttctttatcctgctcaatcatggctattaatccctctttgttatcaataagttgctgtgccaattctccatcaatgtcttcttgattaagaattttccagaaatctgaccaccaaggtacacctttaactaaattatctgctattattccgcgaataaaattaactttaatccacctgtttttaccgtaactatcaaattgattttcttgaaaaaattgttttattaaaaaataagtatttaaaatatttagattaatggttatgtctctagtttcgattaaacttctttgatgagagtctttgttgaatttttcataaagtaaaacttgacaggttcgttcacatgacctttgggtttccacttcatgccagctataggtaattaaggcagcttctcctaaactcgatacatgataatttttataagctaaatttcctgactgccaacgttgataagcagcctcttctaaatcaagaatttcaggaataacaattaaatatttctccggattgttattgtctgttttttcgtaatagggatgaaaaataaaatactggcaaacaacagggacaaataataaaactaaggcaaactccggtttttcttggattttattatatttgtctagcatggcgtggcgaacggttgcccctaaatatagccaactaataatagagatataatctgttaatagttgtccagcttgacaaagttgtttagcaaaagtttgatgagcataccattttataggtttataagttagttttcgttgttttccctcaatgataatttcttgaactgtttgtttaccgtatttacaaaatttacaatgtctaagaaaagtggctcctatcgagaaatgcaaatgaatttggttaattagttcaattgatgggggatttaagcctgtcaaagtaattaaacctttatcgctaatctgaaaagattgttttaataaccagtctaaaacctcaaaatcttctccttgccagttgagactaatactatgagaagttaacgaccagaataaatgaccaggacgttgctattttcatctttttctgttgtttcacgccatgtaggaacaaacacaccgcacatcattttatgcttgccaccaatgccactttgctgcaatttaatagagtccttttcgctgagtttggtaactttcatcccaaatccccgcagccgaaataactgatgttttttcttaatggtaagcagcctacattgaacttcaccattagctcttgtcggtaattctatagttccttttattccctttcgattcagttgacgttgagcaacttctaaaactgcttcaggtgtttcggcacgatgaattaagaccaagcgagaataaagggtagaagctggttgtagtgcagtgggatagggaattcccagttggaacttggcttggtgcgaaactcgttctataccccagtcaatagtaatggtttgtcctgctagggggtaaaccaaggggatctggtcaataggcagccttatgcgaagtcgtgagcgattggtcaggcgaagttgattgaggggttgaggaattcctgctatcggatgaatgctgattgcttccatctcatgaattactcgacaatccaatttttcaaagaaattttgtttggttagaagattatttaattaaatgtcctaatgttgaagctcaagttactgatgccgttttagctatggtcaaagctaatcctgggatttatttaagcgaacttcaacagaaaatagaaatagcaagtattgatgattttcatgttttaattcttactgataaaatttatgttgacctatttgccattcctttaagttgtcctgagcaagtccaggtttttcttagcgcgacagaagcgtttacccattctcaactgacaactattgtcccttcaaattgggaaacttttaattctcccctcaatgtagcaataggtacacaaatatcttgggatggtcagccttggacaattgttaacctaggaaataactatgtaggacttcaaggagaaaataatacatttcaacatttacctaactcagttttttcaactctggttcaccaagagaaaattgtaggattatcttccccgaatttttcttcacttaatcctaaaattgaagaaatttttagttataccagtcaagccgaccttcaagaagctcatagacgctatcaacaaatagaagcttttttgaaaggtacggcttcaactcctactaatcgaactcaacggcgatggctggcaagttaccgaaaagctgaacaactttatggtagaggctttatcggactcattcctcaacatcgccacaaaggaaactctttatccaaaatggacaaagacgttcatcagttaatggaaaaacatatccaagaggaatatgaaacccacaaacagccatctattcgtcatgcctttcaagcttttaaagaattatgcgctcatactggtcttcggccgcctagtttagaaacttaccgtcgaagcatcagaaatcgcccagtggtagaacaagttaaaaaacgtcagggtagcagagcagcctatcaagaagaaacattctacgagtttcttgaccgaaatacaccaattcacggtgaacgtccctttgaaatagctcatatagatcatactttggctgatgtccaattactcagtcttataatgttaaaccttggtatggagatgaatgagggagaacatcaggctaatttaggtaaagcctgggttactcttctgattgatgcttattctcgacgtattttagctgcttatatgacttttgattctcctagttaccgctcaaacatgatggtgctgagaatttgtgttcaacgttttggtcgattgccccaaattttggtagtagatggaggccgtgattttcaatccggcaattttgagatgctgctggcttattctcatgtcactaaaaaggaaagagccaacacaagagatggtagtgtcatcgaaagtttttttggggtagctgacagagaattttggcataacctcaagggtaatacccaaattatgaaaaaagtccggcaagtcaccaaaagcgttaatcctaaatatcatgcagtttggacactagataaactctaccgctacttttgtgaatactgttatgaaatttacgacacttgcccgcatcctactttaaggatgactcctcgtgaagcttttgagattggtttggctagaggaggtttgcgcggacatctactcatcccttatgaagaatttaagctgttatctctacctgcaccgacggataacgatggaatgcgaagaattacccccaagggcatcaaaataaattatctctactatggtcatccctcgtttgagcgtgtaagaaatacccgtgttgctgttaaatatgaaccgtttgatgtcactatcgcctatgcctatataaaaggtgaatgggttcaatgtcgttcgggttatatacgagaactacaaggacgttcagttaaagagttaatcacagcatcggacgagttgaaaaagcttaatcagttacagaatcaacaatttagcgatattacaggcaaaaacctggctcagttttttactcgaattgagagggaagaagccattttaacaccctcttggcgcgaggcgaaaaaagcggttcaagctcaacacttacgagatgaggaacttaaagaggtattaaatgaaattgagggtaaaccttctacaaaagaaacttctaacgattcatctgagatagatttatttacttttgaaaatagggaatatatagctcttagttcctctatttctcctccttcaccgatacaacagacacaagtcgatgaagacgacgacaatgacgaattcgaggaactttttgaacctttggaggaatggtaatggcattgcaaggatttccccctgaacttctcaaccaatcgccacagaaacgattggattttttcaagagtccagacataacttttatgcacaagattttgcataaaacctacaatcagttataccgcaaagtttgtaagcctgctggagcttctacaattctccttatcggcccttcgggagtcggcaaatctactttaatggacttactcaagaaaagaatacttgaagaaagtcttcctcaaatggagcttgagccggcttggattcctatcatttgcgttgaagctgatgcaccaggaaaaggaacatttcgctggaaaaagttttatcaacaggttttgttagaagtcgatgagccaggaattaaatataaaatcgactataacaaaattaactatgaagaagaaggaatacgtcgcggtaataatggcagattaattattggagcgagagcaacagaagattctctcaaaatatcaatgaaacaagcactcaaatatcgtcatccttatacccttgctattgatgaatttcagcatattgggattagagccaatgaagatcttctcaaagcccatatggactgcttgaaatcagtggttaacggcacaaaaattcccttaacgggttttggaacttatgaattattggagtttttagagttaagtcctcaattaagccgacgcaccttaaaaattcattttcaccgctatcgatgggaaaacgatgatgagtgcaaagaatttaaacgggttctctataacctaattcatcggatgccttttcctaatcaacctaccattacaaaacaaatttgggaattttgttttgagcgcagcattggtaatataggcactttaattgattggctgactgatgcttatgatcttgctctggctaacgatgctccgagtctgtcgtttgattatctcaaagaaactgctaaatctagacttgattgtgagcagatgattgaggaggctattgagggtgaggctagacttgaagaaaccgaagattctactaatcgcctaaaagttttattgggtatgaaatcagcttcaaagccgtctaaaagcaatgctaattcaactgatcctaactcaactgcccaaaaaactaaaaaagatgttaaaaataaaccctttaaacgcaaacccgtccgtgaccaagtaggagggcaagatgaaacctgactcgtatgagccgctagagtggtatgacttaaaattgcttatcttacccaaatttctttatttgatttttttaaccataaactttagttcatcggtttttgcatctccagaaaatttggctaaagctcaacctcatcaacaaaagcgtatatcacctcgttcttgtgatttaaaccagattgaaaactttttgaatcaacatcttgaacaatctcctgatttaatttcccctcttacaattattgctaaaaatctcaaagtcgataaaaaatttatatctcggtattttcgagatttatgtcaaaaaattgtagctaaacgcttaagttataaaaaagattgttatttagattccttaaaacaatgttgtaatgaagttgaacaagttacaaagatgctgtttaaacagggagaatatccgacggaagactgagttgctcaacttatcaccaagcccagttattttcggtactctcaagtgcgtgaagtttttaacacaactcgacatgagttaggattaaaattaaataactaatttattcttaactcaagtgacatcaataacaacgataagttgtccaccttctttgacaacgataaagtgaccaatttggtcaacttatggttgttgtcccattcatctaaatcggtcgtccaaccgacataatgctgcgcggtatgcttgggaga

SEQ ID NO: 897 - DNA, 23348 bp, Nostoc sp.
  source 1..23348: mol_type = other DNA; note = C052
tgacaataatttgtcatcgctactttaacagccatttaattcgtttgatgacaacaatttgtctctgacgacattaatctgtcaacgacgacaaattgtaatttaaagcttggttttgccgtactttaaagtttgattttgccactacattgcctcaatcccagtaaatccgttccacgaatatccataatataagcagtttttaaagcctgagtttgccggaatagcaattttaaagtttgacattgccgaaatagtctgaacttgttatggtgtttttataggtaaaattgtactaattttagaggagataaccatgctctatgatgtcgagtttcaagcatggtgtaataatttgcagctctcccaacaacaaagagatttggttaaccaaattaggacttccccacctgctcgtaaagtccaaggaggaggaagaaacgttcatggtccctatgctagctcaaagatgggtagaacgattcaatttgagtctcatactgttgaattacccgctattactcaattttatgaatatgacgaccaagttttagaatattgggatcaaccgattaaattcagtatcaaatgttcaccacaaggtaaacaagccacaactattggccattatcccgatttctttgtaatgagaaaggattgttgtggttttgaagagtggaaaacagagaaaagactggaaaaacttagtgaggaacagccttatcggtatcaaaaaatagaaagacaatgggtggatgtcattgttcaagaatatatcgaaaacttaggatattattatcgtcttcgctcagataatgaaatcgattgggtcaaatatcgcaatcagaaatatttacaaccctacaaacaaggatatttaaagcaacaatatatccttaatgaccaagtagaagccaatgttcaagagattatcgtcaattatcccggtattaacctcatcaccgtgcttgagaaggcgaaaaatgccactattgatgatattaataccttaattgccctcgaaaaagtctatgtgaatttaagcgaagtagctttggtggaacaagagaaagttcatctattccgtgaccaagctactgccgaagcttatatcacggccactcatgattattgtgaacctgtatccagcaatgtgtcgatagttgatcttaaagcggggtcatcatttttgttagatggaaaaagcctcaccattgaccatataggggaaagtaaaatcatttttagaggagaacaaggaattgttcgctggacttatgcagaatttgaacaattaatcgaattaggggaaattagtagtcttcagacagaaaaccacacaactctaggtgaggaaggatggcaatactttctagaggccagtcctaaagccttagaaactgcaaattctcgttatgcagctattaagccttatttagagggagagccttataattctaaaaaatgcgatttatcagaacgaactttacgcgactggagagcaaaatatcgaaaagcccaacaaaaatacggatgtgggtttattggcttaattccccaatacaaaggcaatccaacccctcgttattctgatgaagatttagaatttattgatcaagtgattaaagaacaatatgaaacttttaaactaaaaaatgtttggcagacgtatgaagttttaagggataaatggcaggaatcgggacgaatttctcctattcctagtcataccctttattacgagagagtgaaaaaacgaaatagttatcaacaaactaaaaaacgaatgggatttcgtgcagcaaataatctgttgggaccttggttaattcaacctacgacccctcgtcatggagatcgcccctttgaaatcgttcatattgaccacacaaagcttgatgttgagtgtatctgcccctatagtggcaaaaatttaggcagaccttgggtaacaggcatgattgatgcctatagtcggaggattttagctttataccttacctttgataatccgagttaccgttcttgtatgatggctattcgcatctgtgtacaacggtttggacgatttcctgaatgcattgttgtggataacggaaaagagtttagttctacttattttgagaccttgttagcgcgttttgaagccagcaaaaagcatcgtcccaaggattaccctaaatttagttcaattattgaacgttggtttggctcacaaaatactgaatttattaataacttgagggggaatacccaaattatgaagcacgtccgcttcgttaaaaaagcaaataatcccaagaatctagctgtctggaatttagaagaattatataattatttggcatttggttatgcttatggagtttatgataaagcagaacatcctgctttagaagggatgtctcctcataaggcttttgaattagggttagctacaaccggacatcgccctcatcaatatattaagtatgatgagcaattcaagattttaaccttgccgacgaacaataagggaatggccaaagttattcctggtcaaggaattagagtcaactatcaaaattattgggcagatgaattttacagtgttgagaatcaatctattcccgttcgctatgacccactagattatggtgttacttatgcctatgttaataatcattgggtaaagtgtttatccaattattatatgaagtttcaaggacattcagagaaggcagtagcaatagccacaacaatttgcagacgaaaacggcaaatatataatcaaagtcaatatgtaggttctaaagagattgttgacttacttaataatgcggaagaaaatgaagaattaatactacaaatccgtcgagatcaatctgctaaattagttttcaatttaattgaaggaaacctgagtagtgcggtattattaaatatatcaaatactgaacagcatttatctcaagatagtcaaacaatagaagaagaaaatctagatttaatagatttaaaagaggataatttacagcctaatctacccaaaaaatttaatcctgatgatattcgggcttttgctgaagaggaattgtggtaatggttacaaatcgtcgtttccctcaagaaattttacaagcaccaactgataataaacttaagtattttaaagatgtaattgttcctcatcgcaatattaaactggttctagagcagctactaaaaaatgctatagaaccggatgatgctttagtttatttggtgtttggggtaacaggggtaggaaaatcacgattaaaagcagaatttgaaaaacgattgcttaaacattttgcagacgaaattatttctaatccaggaagtttagtggtaggaggaatcgaggtagatggtgctgaaggaggaaagtttaactattctaattactatattcaagttttggaatctttgaaggaagttttaatcgattataaagagaattatggagttgatttagagaattacaactcagataacctaataggagatcatgaaggaagaaacgctaaagctttgcgtcgaacaatgcaaaaggtttttctataccgtcaattaaaagcttataccttagatgaagcacagcacttatttgatgttgcgggaggaagacaaataaatgttcaaatgaactggcttaaatcactggctaataaaactcaaacggttcatgttttatttggaacttatgaacttttaaaatgtcaagaagtcaatggtcaagtgggaagaagaagtgaagattattatttatctccctactatctgactaaatcagaagatcaacaagaatttattaaggtaattaagactttacaacagtatttgacagttgaaaatgaaccacagttagaggaacattgggaatattttatggaatactcaataggatgtgtgggtattcttaaaagttggtggtatcgcgctctcaaaaatgcgttagacgagggggctaaaacagtgagaatgaaagattttaaagcaagggaattatcagcaggaagacgaaaaacaattcaaaaagagttaaaagaaggagaagaccgtttagcttttctatataagaacgaggaaaaagttgaaaagtctgaatctatcaattctcaagcagtgaaaaaaggtagaaaagttggggaacgtaaggtagggagagacttagtaggagttaatcaagagggatgaatatttatgaggaactttggagtccaaaacctctagaaatccctcaacggagtcgcttattttgtcttgaacctgtgggtatgggaactccccatacagaaagtctcagcagttatcttaatcgtttggcacaggagcattgtttaactgcccagaagcttattatggcggaaattgcactacttattttggaaaatgaggataaatcgaagttactgcaaaagagtgtcagctatttattaggaaatagcgatgctaaaccggctatcaacggaatgcgagaaatgacagggaagttagtcactgtcttagaagagctaacaatgcgtcaggatttacgctttttgacccttttaagctggaaaggcatgatttatgacaaggggttatttcggaactatcgcgcttggtgcccttgttgttgggaagagtggaggcaggagaataaaactatttatgaaccattattatggtcatttaaggatgtagaattttgtttgattcacaaacagcgattaagagaagaatgtcctcactgtggttcgcgtttacctgtaatggctaggctttcacctgcgggattttgttctcgttgttacgggtggttaggacacaaaattaaaggcgaagaggaaatagagaaatatcgagttaatattcaaggaattagtgaattaattgcacttactccccaattaggttataaacccatcccgatcgagttaacccgaaaattacaattgattttgttagtgtttgaacaagcaattggaaaggatttgaagttattgggagatttagggggaattatagaatctttgaggatagcctcaacaacaaatcaaagtcaaccttatcatttggtgaagttgattattcctgtgtgtgagaaggcgaaaattagtgtatcccagttgtttgggtcacattttcaggaattgggcaaggtattgttcggtaattttagtctggaattaaagttgtagaagtttggtgtaaataaggatttatggttaaaggagtttggcagggaacagacgatcgctttcctagatcgggttactgctgattatgctttatttgtgcaaggggaacttctcgctattgttaaagcgaaaaaatctctattggcacacaaaatgtttgaaaacaagcgaaactcaaaatgaacagcatctttacccccgaagaaattactgccctctctgccgaaattgaccgccagttaacagaactgcgctatgtcgcaaattcagcgctaaaacaaggagaggataaaatctcagatgaaaaattgctggtaaaacaaaccgcagcaattacaaaatttacacaagagaactctaagagttttttgcagaaatttggacgagctgctaaaagtgatttatgccaagaagggggaatgctgaataagcagtggaagaaatggggggatttggataataaggatgctttggaacgcttgggtgcagtgttggtaacgatgggtttttcgggggatatgttatctcctttagttgtggcggtaacggtgactattattcatattggattgaaagctttttgtgaagattattcttcggatgtagataataaatgaattttgtctcacgcagaggcgcaaagaaagtaagttaggtgtaggttgggttgaacgaagtgaaacccaacatgagtatcttaagttgacatcaatgggcaaggcattgcctagaagaattgatgtgtcgcaaatattatagcggttatcggttgagtccacacagtcttaagggcacggcagtgccgatgcccctacaggtgaatgatttttacttccgacttccgacttccgacttgtttaatatcattctgccaataacgctgcaagggattgagggtcagcaataccccacaggatagcggagataatcatagaatcttccaaatttaacggctcgcacagtatattctcatctcgctcgccggctaagatatgacggatggcagcaacgagattttgccaatcttctgcaaaattttccaacgcagtttctagctgttccctgatttgtgcattatccacagcagctactacccctgcaataaactgcccatgttgccgcaactcatactgtgtccccgcaaacgccgcttttgcttgccttgcttggcgacgatattctttagcttgggtggtgtcgccctgcttgtcggcaatatctgccaagatgttatgggttttccaaatctgagccacaaccgggtctaaggttttcttgatagctaatgcttcttctgccaattgttgggcttcgctgcggcggtggggttggtcttgtagtatgagagcgaggttacttaatgtgtcagatgcagttgctcgatcttctaatttttgaaattgcttcaaggccttacgaaaccaagcctctgcctctcccagtttgccagcaagtgcattgaggttgcctaattggtgccaagacattgctgcatctgccagatttcctagagattctgtaatttgtgctgattttcggtaggcatcttccgcagcgtcccactgcttgccttctccgtacaccacacccaggaaatgccaacctgtggcttcttttgctggttcgttgagttgatggaaagtattctgtacttcacggtaacgctgttctgcttctgagaggttgccttgcagcagggctaacttgccgagttgtccatttaataccgcagccccactaaggttgccaatttctttataaataactaatcctgcttcatgagcaatgcgtgcctcaccataatctcccatatccgtcagcgcatctcccaattcagtctgcaacgttcccatcagtgtcttgacatcatcagactgttccaactgctgcgccactgctaacccctgacggtaaatttctgctgcttgtgctgtttgtccttgcaacctcaagcaccgccccagccaacccaaagtaacacaacgttgataaattggttgttcacccaacgctgtcagtatttcattaaacacctgcgcggcttgttgatagcgacctgcattaaataattgctcgcctgaactcttacggctgagataccatgtatcggaacctacttccccagtcaactgagcaatccgttgatttagtctagtgcgatcgcggtgaagtccaaagtagccgagaaatctgtttactttgtcagcaaagtctactgcccattttacacctgcattcaacgcgccatcaactgcataaagtaaattcggtaattcctgttgggcaatggcacgaactgcatgaggacttttgctatcttcaaaatacaaatagcgagaaagttgataatactgctgttgataacgggcaaacagttgtatctgtgcttctggggataagcgcggccacaaggcaggggctaaggtggggtgaaatttgagaaaaggctgattaacttgaattaaaccagtggcttctaaagctgggcgcaaagtttgccactgtgactgagaaatttctgtaattttcaacaagtgaatttctaacgtcccgccttgaaacacgcccaagcgaggcaacaactgcattgcttcagcatccaaccgttccaaagataaattcaacgatgccaacaggggattatctggtgtttgggcaatcaaggtttctaagcgttgtcccaactctgccggacggcgattttccaactgtttcgccaacaaaccaatggacaggggatgaaaatccaccagtttaaataattccaataacacgccccgtttaggtgggtcaaatagaggtgctagcgtcaatttaatcaaactctggaaatacgctagggcatcttcttgtcccaaacctcgcaaaggtaaggagatatgtttgcgactgccttgtgtgggataatcgggatggtgaaaatctggtgtgcgagtggtgagtaatacctgacattccccaacctcagaccactgttttgccacggttaacagttcccgtagggtttctgctggcaaggtttctaagttatctaaaatcagcaatgtggcttgcttacgcaacgcctgagttgccgccgccccatcaattaaactctcgtctaacactgtccccaaggtgctaactgcccagcctacagcatccacaccaccaaaggcagcataatccacaaaacaaactttatcaaacatccccgtgcggtgtaaccagcgtcctgcttcctggacaagataggtttttccttgtccaccaaaacccgatactgtgaggcggcgcgttccctgcacaaaccagcgttctatctgccacaattcccggctacgaccgaaaaatccagcttcttgtaaatctggcaagtttccccattttggtgactcgccgctttcttggttgttcaagtctggctgcaataatggggtatcaccagatgcttgatacaaagcaggtaaaaaccaatcttgcaattttaactgtactcgttcctcaccccgttgccgttctccccgttgttggttgagatacaagtctcgccgcgcattatctaatgcttcacccataccagcaccagatactaaaccctgataaaatttagcaaatagttgttgggttgttgtcactaataccgaatgagtcattgccaagactgtgggaatacctgcatgggttaacctagcggcgacactacccattgcatcttctccatcttccccacccatcgccgccgactgacaggcagacaaaacaattaaccccactttttgccgattcagcatatcacccaaggtttcggcagtaatcagggctttttttccttctttatcctcaaataacaaataaccgatattgccactgttctcgttcccgcctttagttagtcccaccgggtcgctatgtttagcctgttcttggaaacgcccatctaaatcaaataccccatgaccgtcaaaatgcacaatatcaacagggggtttgcgcgagtcttctagccgcgctactaaattatccaaggtggctggacgcaaaaattctacctcaacccgtccggctgctgcttgttgaatggcgttcaaaactgccattgcttcaccacgggggtcaataaatcccgcatcactgggacgactgatgacaaacaataaccgcaatcggtctttgacttgcactttaaacggtctgcgtccaccccccgcaccagccaagcggcgacgaatcgaaatgcggggattttcgtgaaataaataagtgccttctgggtcgcataacaattcccaaggcaatgataaaattgctggatgactagcgctgattgttaataagcgtcctggttgattttcatcttgaaaataattaaacagccgttgagcagcccgatgttgaaaaaccgcattaaataaatcttcgccccattgccggaatttttttgctatcccttccgcccgtttatcgtctacatccgtagtgtaatgagccgcataggtttctaagtaccagcgaatatcctctctgtctgctgcattcaacggtgaggcaaaatccagcctctcagtgtcttgcccatcaaatgttacaatgacttgatgattctctgggaagcggagatttaattccatagccggctgtttggggtgtggaagcttatttgagataatacaagctttttagcctaaattccgtaaaaatgctaggcgatcgcatttagcaatgggctaacgcagctccgctaacgcacttaaaaaacttagatgcagcagcacttttgtgatttatctctgttgccttattttggagaattgatatcagtccaagtatcaatactgatctgacgatcgcctgctttaagaactgttttattcttcctccccaagctcaccaagagcgtcatcaaatttgttgatgatgtcgagtaattttgatacgactcgcgcaaagatttttttacgctctaataatttcggtttttcgttgcaagcactcaacacggtttcccttaatggttctttcccagagaatttgtagtcagcaatcatttgattaacggcttcaatcttgaggttctcctctaggcagagttgctgaatcgcttcaacacgttcttgagtccagaagtcttgaaagacggtttcgactttttcttcgggttcgagggtgggtagccgctcttcgataaatttctcaagcagatcccgcttgctgcgtagttggacttctttcccgattagctcaaggatagacgctttctgattttggtaatcttcctgggtagcatcatccttgatgtctcgctggaggttagccagcagcttgagaatataggagacgttaatttcgtctcgctggatcagttccagttcaaaatcgacttcctcaaccaaagattctctctcttcatcgggtttggatcgcgttctatcatagatatccagatatttgcttttgtaatcttcaaaggtttgttcatccagattcaagtcggaaaaactaaattcagtaaatgatttacttacattctgtaaacggataagattacgaaaggctttaacgaacttaacttggtcttcttcactaataagcttattgacatcgttagggatagtggcgatcgctctcagttcttgcacaccttcattgaatttttcagtgtagtattcgtagggttcaatgaaaatttcttcgcttgcgttggtgtcggaaaagagggcaacggcttgatcagtattctctttgaggttacggaaagagacgatattcccttgggatttcagttcgcctaaaatgcgattagtgcgggagtatgcttgaattaatccgtgatacttcagatttttgtcaacgtaaagcgtattgagctttttgacatcaaaacccgtgagaaacatattgacgactaacagaatatcggctcgttcctgatcctgaaagttttctcgatcgcggtctttcatccgcttggcgatgtctttatagtaggcatagaaagcctgactatctttggcggaatgttgggtttggtacatctggttatagtccgcgataaattgattcagtttgtcgcggctatggctacggttgcttgtatctgcgctgatattaaaatcaggttctccaattaagccgtttgcgtcttggtcttcttcgttatagccaggggtaaaaatcgtgatcactcgtaggtcatgtaatccctgtttttgtttgtttttgaacgtgtcgtaataggtaattagggtgtctacgctgctggcgcagagcatggccgagaattttctaccgtgggttttacggttatggttggcaataatccaatcgacaattagagaaattcggtcgggattttcaaagaattctcggtctaattttggctctgtgatcagcgtgccgtctttgggtttgattttgccccaatactcgacggaaaatttaagaacgttttcatcagcgatcgcattagtgatcacatatttatgcagacattcgtggaataggtctttggtggtgcgtttaccgtgttgattactggcagcgttatcggcaaagatgggagtcccggtaaagccgaacatctgggcttgggtaaagaatttgacgatatttttatgggtttcgccaaattgagaacggtggcattcatcaaaaatgaacacaatgcgcttatctttcaagctctccattgcggcttcatgtcgttgggattttatcgcacggttgagtttctgaatcgtggtgacgatcaggcgactatctccagccatttggttaacgagttctttggtgctatcggtggtgtctacgcatccctcgctaaaatgattaaattctttgctggtttggtagtcgaggtcagcgcgatcgaccacaaacaccactttatgcactttagggagttgggtgaggatttgggcagctttgaaactggtgagggttttgcctgatccagtggtatgccagatatagccgtttttatcggtatccttcactcgcttgattatggcttctactgcgtagtattgataggggcgtagcaccatcagcactttatcggattcgtgctggacaatgtatttacagatcattttggagacgtggcatttctccaaaaagctatcggcaaagtcttcgagttgggtaatcagggtgttgtcttggtttgcccagaagaaggtttgtttatattcttgtttgcggttgttggcgtagtagcgggtatcgacaccgtttgagataacgaatatttggacgtactggaatagcccattgtctgcatcgtaggagtggcgctggtagcggttgatttggttgaaggcttctttaagtcccaaccctcggcgttttagttcaatttggacgaggggcaaaccattaattagcagggttacgtcatagcggttttcgtatttgccttgctggctgatctggttcgtaacttggtattggttttgacaccagtgttcagtgttgagcaaattaatgtgaaaggtggtactgtcgtcgcagttgagtttcatgttttcgcgcaggcgtttggcgcgatcaaagacgttgcctttgtcgaggtagttgaggatttgcttaaattcttcgtcactaaactgggttttattatgcttttctagttgggctttattatgtttttccaattgggctttcaggttggctttgaaatcttcagtattgcgaagggtgacgaattcgtaacctagtccagttaggcgatcgatcagctcttgttctagttcggcttcggattggggcatagacgtttaccagatggctctttactctgtttctaatattccccaaacatccaattaaacaaacattttttggagtaagccttttttgaatttttcggtttgctcgatttgacgggtgagagtttcaattttgtgatcgattgcggttaggaaattggctattttttcttgttcttttaatgaaggaagtaaaaaaataaattccaaaaactttgaaaaatgaaggcgttttttttcaagaagcgaaccttctgccatctgattatagtatttaattgagttgtgacttttcaggaaaaactcaataaaaagtaagttgatagtcttatctaatgaaaatatatcataatattttgaaactttaacagaatagttccttccatgtcttgctaaagctccaaatctaagattcattggattataaacaaaatcattggactctactaatttatatgcttcttctacatcttttacgagaaaacttctttcatatctttctgttttttctgtaatgccattttcaatggtcaaactaaacaaggggatatcatcagaagcagtaacatcttttttgaggataaattcactaaattttcttggttcccaattaccagaaaactctggaaatctaacttctggcgttttcttctttttcctcaagccaattttgtgagtgaatagtttttgtattacgccgcgtttataggtttgcaggagttcccgtttgcggcggagttggtttaggcgcgtatccactgcccccaaaaaactagcaatcttttcttgttcttcttttttggggagagttatctctaattcagcaaagctctcttgtccaagagttttgtttctacctgctcctcctggtgatgctaactcaagcaagtgcttgccgcgttttctcaagaaaaaaagcagtacaaattttagatcggctctattgtctcttggtcggaacatcaaaaaacgatgagaagcaatataaccctgttcatggctactggttagagcaacagcttgctcccatgcaaaaacaatattaacagtgaaagcttctggatgaacccaaaaaactctcttatttcctaacgcctcacttgttacaggatctttatgaaagatacctttgccatgtgacctgattccaatttctttatatattatttcaggttcaactttaacaggattaacgtagcgaactaagaaatggtcaactctgtctgtttcccaatccccatgaaactcaggaaaccgaagttcaggaactttattttttgtcttcttagtcatagtggtgcctcaatccccaactcattacagaaactacgaatgaggtgatcggtttcttgcatatcctgatcaactttccttagctcacgcactactgcatctaaatcaatcgcttcttcctcctcaaacgtatccacatagcgcggaatattgagattaaaattattctccttaatctccgctaaaggtgcgcgataactatatttttcctcctttaacctttggcgataggtggaaataattttgtcaacatcctgatcccgtaaaagattttgattcgttgccttctcgaaataggcactagcgtcaatgaacaaaatatctccaggattttcccggcacttcttaaacactagaatacaagtggggataatggtgccataaaaaatattggcaggcaacccaatcactgcatctaaccaattcctttccttgattagatacttacgaatacgcccctctgtcccccctcgaaacaaaaccccgtgaggcaacaccaccgccataatgccgttctcatccaggtgatgaagcatgtgctgtacaaacgcaaaatcagctttagacgctggagccaacgcaccatactgactaaagcgatcatctgactcaaatatcttattggcactccacttggctgaaaacggcggatttgccactaccgcctcaaaccgcattccctcatgctgggggttctctaacgtatcctcctggcgcagatcaaaatttcgataatgcaccccatgcaaaatcatgttcatccgcgccaggttgtaagtcgtgcggttcatttcttgcccgtaaaaatccccgactgattccacctgccgcgccacccgcagcagcaacgaacccgaaccacaagtcgggtcataaactgacttcagccgctcctttcccgtcgtcacaatcttcgccaatactttagacacctgctgcggcgtgtaaaactcccctgcctttttccccgcaccactagcaaactgcccaatcaaatactcataggcatcccccagaacatcgttctcggtgtctcccaaccgaaaatcaatcttatccagatgcactaaaatcttggcaattaaagcattcttcgccttcggagtccgccccaacttcgtcgaattcagatccagatcctcaaataaatgatcaaaatcttcctcactttccttgcccattgtggagcgttcaatactgttaagcacctgggcgagatcatccaaaataaaatttgacgactcaaaatcctcatcccccagattttcttcatgggctttttttgcccctaatgcccgctctgccaaagaactaaacaactccgacggcttgagaaaataaccgagcgttgcgatcgactcttctttaattgcctctaaatattcttgtccctcttccgaggattcatcaatcttcagaaagtcaatgccatcctccgctaacacttcattggcataaagatgctgacgctcagagaggtacttatagaaaataaaccctaagcaataatcccgaaactcatcagcatccatcttgccccgaagcgagtcggcaatattccaaagctgagtttctaattttttcttttgtccgttcagtccgttcgtcatttatctctcgtactgggcgatcgctagcaccgccaagaagtggtatctaagcaacgtaagattaacacacaagatgattcgtttgtacagtgcgtaagtcctagaccacattgcaacaggaaattgagcagctaaaagaaagcctcaagcagaatcaaattattaacgctttggaaaaatccttctatgccactagcggcaaggctggcaaagatgaggatggctatagctatttcgatctgataagcgatcgcgccatcaattatattctgctagatgagcatgacaagtttataatcattgacccgcacggcaaaacgccgctaaagatactaatggcttggaatcaaaatctcaactttgcgatcgcatttttatccacagcaacgcaaaatccgcaagtttggactgctgttgataagaatgaaaactaaatgacttttggtacttgagcgtcagtttttctcaaggagactctctttcactataaatcgttatagtttgtaaactgtagtagctcaaaaatttatgttttgtttactgctgtagctattatatgtccaacaaaggtgaaaaaaaaaccagaatttatatttacattgaggacgttgtatctgtagcctggaataaagatagaggaacagttttaaagcgactacgtggaaaaaaatcacgtcagaagctggctgatgaaattgctgccagaggcggtgagtgttcgcatcaaaatttaaaaaaactagagtacggtgagtctgaaagcgtctctttaaaagtattagaggctatttgtacagcattagaaatatcagtaagcaattttttaagcacagtcgaagtgacaaattaaagttttaaacatacttgttgattttagctactgaagttactaatatattgatgtactcaaaaaggcgatcgccctccgccaagagaaatgcgatcgccttttgttcaaccccgttaatgaggtgactcatgatgattgtacaagatgactttagtaactcagccttggctgaatcagagtttgaggaatatattgaccagtttgccgacccagtagcaccagaaattgaaattgactcagtagcagatgacttgggtgaactgtatcgagtctggaatggttctcaactacttggcactttctaccaaaatctagaggggaaatgggtagcacaaccctgtaatagggatgataggccatgttgtgatagccctttagcagcgcaaataattatcatcgctgttaatggcttactggtagccgacgtagcataacacacaaagcatttatcccattacttggagacgtgattcagttcacgtctctttcttatgtagaggaataattgggttgaacaatttaagttttactacagcaaaaatttatgcgatcgcacttttggtatttggtaatcaagctgactctaactcttctatgctcattgtcgaatttcaccttctgctttacaaagctaattttcgttttcgtagtaagagttacactacgccccggttctgcatctttaaccgtaccatcaaaggttagcggaagttgctaaaggaataacccaaccttatcaagctacgaatcgcttctgcgatcgtagtcagtaatttgacctcgatatttgggcaacgcctaacggcataaagccacgaatcactatccagtcataattgcattagcaaaccatccaatttgagcaacgcctaacggcataaagccacgaatcacagcaaaattgaaaaccctttactgaggaaggttcatttacgatcttacaagtactttccagattgagaaaccaaaaacatacaacttaccaaagttccccttactttcagcccctcaaacccagtaccgataaactttcccaaaaatagcaagcaccttttttcttctctcaattaccatatcccttaccgtgtaaaccttcccgccattctttgatcctaaattccctttcccataagagatacttgtcaaaatggagattgaatcatcgtccacgccaaatcaggaggtgataatctattcatttcctcaatccgatacctcaaaaatcgggtatttcttgaccccacatggtcaacccaatagggtaaggttaacctgcctcgattatccctaatcgcccactgtctcactccctctggataatcttccgagacaagtttgatcgttttaatcaactggtcgctttctgccaaaaataaacaaccaaaccgtcttactagctcaggatggtcaaacgctaactgtatccgctcccttaaacttggttgtatcttctcactatcagaacgaacccaaatcaaacacttcaaattagacaaaatttcttgataacagggaataacattctctggatggctaaaatcagcattcttaaaccgtctcatttgacgtaaaattcgtgactttttggggctagataacatcgcgatcgccaattctaccccacagtggcgatagacattcgtttcccctaccaaagacaacaacatcccatacactgtcgctggaggagggacaggataggtttttcccatttcccttgcatgggactcccgaaaagtcgcaaatggaacatccaaatagagaattaatggtgcaatcattttgattcttctaagcccaaatctcttttaatgactgttttcaaagctgcaatcagttcatttcgattacgataaatatgcgccctgttaaaaggggaattatcaaaattatctaattgctgtaactccttaacaattgttcccccaatccacaacttactagggtcaatctgtccgcattccacttcatctataaactcttgtgaaagttttgcttctttactcttaggatcgcaatattcaaagcaataggaaatatatgaagcaaaatgatttgtccattgaaataccaaactatcgggacagaaaggataattaaaaatattactactccctcctaccttgggcagattcataatcccatctatcaaaggtaaaatccgggaacaatctttaagatgagtggcatcaattccaaaataatattgatatcgagttgcatgatattctgtaaaatggagagatgtactatccttttctctgccactttttgcccctaacttaactgcaccatcataaggcgttagcgaaacagccatgttcatccctaaagcacccattcgctgattaggagtgctggtttttgtttgtttcttttttctctttgttgttgaaatctcctcctctgtttcagcagactctaataaagcaaacccaaaaatatcatcatcataaaattgttctggatcgaaatcttcacttgttaagcgattaatatgttcgtcctcatcccagactcgattaactaaataaccttgcttttgaagataaaaacgtaatgcccaacgaattgcacttgaacctacaaaagaatgaattttaccattattccaatagcctttttgcagaatagtcttatttcctcgtctaatgtcatgatttaaggacgctaaaccataacgagtgaggactgttccgtaaagataataattggggatattattctcatccttcttctgactcataattcacttcttctagtttttgattatttgacaatgaattatcatctctattggtgggcttatctttgggcttataactagcgatcgctaacaatgaccaaattcttatttcttgccaaggtgattttttaattagtagtgcaatctcttcctgatgctcattaaaatacttatttaatccccctcttactaaaaagtcagacaaatattccttgaacgacaattcatcataacaatagtttagctctgcccttaatcgttcaactttcttcttaattggaggatctttcccttcctctgttttggcataaattttagcaaagttgcccttcatagcttgctgaaataccttaataaaaataagatactgcttgtcttcttcactattctctgccatgatgatgagtccttctcgattagaaaataactggttaaataaatattcttttgaatcctctatcaccaatttttcccataaattagaccaccaatggattcctttcactaaattatcagcaatcagggagcgaatcggattgaccttaataaaaatttgcttatatttaattatctgataattagttttaaagtatttttgcacctgttgataagtgattaaaatattcttatcaattttaatttcttctatactcatcaatgtcggttgacgagaagctttatttgttttttcatataaccaaacttgacaagcttgatagtagcccacttccggctgaatatcgtctaagctgtaataaagtaatcctgcttccccaaggctactaacatgaaactgtttagtttctaattgctgtaatccccatctcctttgagaagcgtcttcaaaatcctttatttctggaatcaccaccaagtagcgatggggtttcctttcttttaagtcttctgatggtatatgaagtaagcaataatgacaaactactggtacaaataataatgctaaagcgtattcaggtttctcttctagttttgtagtattctgcgtccgagcatggcgaacaattccccctaaatacagccaactggttatttgaatgtaatcatgtctgagttgttgggtatctgcctcgcataacttctctgcaaaggtttgatgtgcgtaccaagttagggatttatattgatactcgatttgtttttcttcaaacgttagttcagtgttaattatctctcccgctttataaaacttattaagccgcagaaaaacagcacacatcccctcatgaatataaattttctggcttaaatctattgcatcattgtctaatcctgctaaatgaattaaacctgtatcatctaatttaaaagactcattaattaaccaatatagggcgataaaatcacttccttcccagaataattcaatagtatcagcagtcaaaaaccatgatatatatgctccccgttgatgagatgagggatattgcttttctaatcgctttaaagtcatgtagagtcccgtcattccgacgcggtgcattattgtcgtatccgcagcatcgagagatagggaaattttgggttgggtagagactatcatcaggtttcctcttctgacttgctgcgagtcgctgggacaaatattccacacatcatctttcgtttcccgccaatgccctgttcttgcaaggttagggaatcttcaggattgagttcgctgatttttacgccaaatcctctaattttaaactgtttcccttctttattaatggttaattgtcttcgttgaggtgttccatcttgtcgggtaagaagttcaacttttccttgtattcctaaattatccagttgccgttgaacagcttcaataaagttagtcgagtcttggaatcctttaattatcactaatctcgaatagacactttctgaagaaattaacggtttgtagtcaggaatatctaattgataaaaattttgacctatatgaaaggcttgacccgctaaataaggataaattaaaggaatttgttgatgataaatccgaacttttagacgagattgagcagtgagttcaagcaaattgttcctggtcggtattccagcaatcggatgaatcccaatagactttagttcatgtagtgggggacaaatacgggataaggcagcgtaggtaagataaccgttgtcaagaggaatcggtgcgcctttaagtttaaaggttaggtctaggtaatctttgctgtttatacctatggctatcatgtataaagatttttagaaaatttgatactgaagtttaaaagaattaccaatattttaactacaatagtacattgtaaattaagccgaaagctcaggtcatcaaagtataatttttattaaaaactttaggttatttaacaaaaaaatcatcgtcatgaacattgacataatccaaattcaaccctattttgaggatgagctatggagtccagagaaatttccaatgcttgaacgaagtcgtttacatcatttggaaccgattggtatagggactcctatggttgagagtttaaccagttatgtgacacggttagctcattctcatggagtttttgtcaatacattactatcaagaatagttaatcccctcttacagcaaacctttatcaaaaattctactggtagaggattaaaaccgttttttaaccgttctcatgccttaaatggatatggaataatggctactgattttgttgaggttcttaatcacttaactttgcataatcagctagagcttttaacattgatacccttttcaaacattttagttacaaaaggcttattacgtcctcataaagcttggtgtccaatatgttaccaacactggaaacaaaataaacaaattatttatgatcccttactatggtcactcaatgatgtcagggtttgtttaatacatcaacatactcttgtgcaaaattgtcctcattgtcatagtcaattactttggttaaactggaaatccacgttaggctattgttcacaatgttttcagtggttaggaggatattctaaaacttcagtagttactaaggagagatggatagtagaaaatctgggagaatttcttaccaatgcaaatcagttatcttctgtacttactcaagagcttataccaaaatctttcacccatgtagtgcataaagttagtgaagataatatagctgcttttgctgcaatgcacaaaatccctaaaaatactttctggggttggtattcaggtaaaacttgtccctctttatctgctttactgcaaatttgttataatcttcaagtttctttatctcagttcttgacacaagatttcaatctatcaactacccattgtcaaaatctcaagcttgacacgaaatattctaagaacatacgtttatctcccaaaacactggacttggatcatattgaaaataccctgaccaacattttatttcaagcaagagatccattaccaacaattgcagagatagccaaacaattaaaaattaatagacgagttatttcaagacattttcctttattatcctatcaaattgtcgctaaacgtcgcaattatatgggtatgtgtcatttagctgctattgagcagtgttgtcaagaaattagagaagcaattgtctcactccatcaatcgggagaacacccaaccgagtcccgtgtgtgtgaactgattagtaaccccggctatttgcgttataagaaggttcgactattctataagaaaacagttcaatctattttaagtagcttgtgaactttcagtaccaatggagatagttgataattcacattgattttttttcaaaaattttcaggcatgattttgccgttacagttttcaagcatagctttgccgttgcggcaaattcaaactttaagtcacacaaataattagtcactgtacaggattctaaa

SEQ ID NO: 898 - DNA, 31485 bp, Stanieria sp.
  source 1..31485: mol_type = other DNA; note = NIES-3757
gatttattgtcattcctgctttgaggtcgtggctcaagcgttcgtggtcggcaattttgttgggcggacggacattctttttcttatttactcgcaagcttgattgtcactggaagcataacttttcggcaattataaccataatatttccgccatccaatcaaatattgctattttgacgttaattattttgtaaaattttgaccttgtagaagcataacatttctgcaagtcaaaaatagaaacataagctttccgcaggtctatctctcaagatcgagcttctaaattggtttttgttttaggataatatatttttgcagtaacttttttcatctcatcaattcataaacgtagaatcatctcaagagaaatataaatataaccgaccaataatggctgaagaaggaaaattaaatcgatacaaacaccttatattttctaatcccattgattttcccgagacaagttgtttatactcactcgaatcaattgcagttggaacgccttataccgaaagtctcagcagttatttaaatagattagctcaagagcattgtgttactcctcaaaagctaatcatgggagaaattgcgcctacgatcttaggtgataaatacgctccagaaatattctccaaaaatgtcagttctctttttggcaacagtgatgccaaaccagctatcaatgggatgagagagatgacacgatcgctcgttgatgccttagaaaagctaactctacgtcaggatttgcggtttttatcttgtgtaacttggaaagggataattagcgatcgcggtttgtttcgtcagtataaagcttggtgtcctctctgttttgaaacttggcgacaagcaagaaagttaatctatgagcctttactctggtcatttcgggaggttgatttttgtcccgaacatcaatgtgaattatgcgatcgctgccctcactgtgattctttccaaaaagcgatctctgacttctccgtacctggatattgcagtagatgcagacactggctaggaaaaagtgataatactaaatcatcattacaggaagattttaaacaaaaccattttatacttcaaggtattggagatttgattgccttgacccctcaattaaagcatcaacctaatctcaagagtttaaagcataagtttaagctaatcttattttgttttgagcgagctattcatcacgatttaggtcaatatgttgtattaattaaactaattgaaaagctgaaaatagatttaaagcaaaattactttaaaccaataaatttaaccgaaataatcattcccgtctgtcaacaagccaaaatatcagtatcgcaactgtttgaaaataattatgagaatttggctcagatattagcccaaaatattgaaactgattataaaattttataggctagattgtctaaattataaattcactacacaaatttttaggatagatagttaaaaagtactaagttttaattcatttgtctgcgagttgttgattctgttaactaataaatttgtattgaccgagacatcataaaataaggtgattgctatcaagttggaaaaatggcgatcgctcaagtaggtagagaagaacagcatgaagaaatcgaactcatccaaaatccctacatagaattagcttttcctgtaatgggaacaagcttgcccatcgatcacggctatcagctatactcggcattgaaataccgattgatgcaacttaaagattgggatgacatcagcataaaaacaatttcaggaaaatgcgatcgccacaaaagaaacgaaataaacttaactaaccgttcaaaactactagttcgtcttccctcggaaaaagtaccttttgtctattcctttagtggtaaatctttaactatcggcaaccacaaaattaggttgggaattccaaacatgaattttctgcaaccaaagtcgaaaatgcgatcgcatattgttgttatcagaggatatgaagaaccgaagacatttttagaagcagccaaaagacaattagatgcactaaatattcaggcagacattaaactaatctccaaccaagatggcactcccaagcgcaaaaccatcgcagtcaaacaaactttagtcggttttgggattgaagcaaatcatttaagcgaagcagattctataacccttcaagaaaaaggattgggaggaaaacacaaaatgggctgtggcgtgtttgtttaaattattgggacatgattgttaaagcagatgaaccgaaaatagagataagtttaagcgatcctggtatgaccatgctacatcgtgctggagttgcaggactttacatgagtttaaaagctttagccaaacgttatcctaccctgaagtctcggcaaggtaatttccaatggactttaacgaaaaatagcattagcctcaactggaagggaaacgattacgaagcattagactggctatttagtgaatcatttcaaattagtagcgatggtttaatttctctgacaggcttacaatctcccaattgggaaactcaattagctattcatgttgggattaaaaatacttttttgcaacacaatcaattctttagatcggcagaagatgctattgaatctttaaccatcgataatctggaagttcagattgagtacaaaaaagttaagtcttacgcacatcaatactatgccgaacaactatgtccgatagaacgacttaatttcaaacgtatctttactaaattaagactttttatttttattcattacactctaattggatttttatttctgtatgaaattagacaaggaggtaatttagagcaaaatgtagtaggaataacgggttggctgtatcccggtgcaacagtcaagcactatgcctaccaaaaagaaacccaattcaccgaaactctagaaagagcgatcgctctactatacgctcctgttgcttgtctctacttcattgcgcctaaatcttatctttacgacaccaaaactcaatattgcctagttattcccgaaataactgatttaaaatcctacccacgacaacgacaaaagctgaataattggaattatcaacaatttctagcctctggatacagtgatgctggttttcgcctccttacccaacaagctactctacgcattcttcaacaaaacaacctgaaacgctgccaaataattacctttggtcaaactcaatggacgagatttcagaaaattcgtaaaaacgttgaagtaatcgaactaaccgacaagataatcaaaaactatcgattatgcgatcgctattttaagaaccgagtagtcgaatgggaagacggtaacttcatcgctgcaagcattgtccgagaactgatcgccgaaaacttagccagaggattttcttggtggcataactttactcatactgtcagaagtaacaagctatttagattaattagctacgaaaagaaaggattacaacaaatggtcaaaaataccgattgggatgaagaggctcaaaaactattcgttcaagcctgtcataaagcacttcatcaaatacgtggcaaacttgctagtaaagctaaagaagacgagtatgttcaatttgagcgagaaaacgagcgcatccgttctagtttgatccgttgtcaaaattcagaagatttacgtcattttctggctacattctggagcaaagcaggaataatttccctcctttcacaacattggcaacaattgatgcctttaactactaaaccaagcaactggaaacttgccagggatttagcattattggctttagctagctacacaacaccagagggatacaaacaaacatctcaagaagagaaaccaaaagacgtagaagatagaaaaccagatcaagaggaaacatcctcttctactgtaaaaacccaagaattatctgaggaggagtaaaacatgaccttctatttgtatggaaatatccttactttctatggagtagcagccaataatcgtggtgaaaatcaaggcaatataagtactctacaaaaattactttggaaaggagaaacacataccaaaatctcagcagaagcaatacgttgggcaattagatattactggcaaaaagcaggttatcaggtcaatcgagtttgggatgacgaagttaacgactatacttggcaagaccctaaattcaatcccttagattttatcgatgacgatttgttagggttttttgaagctgaaagtgccaaaaaagagccagagaatgctcctaataaatcacagtcagaaaacgttaataacgaaccacagccagagaatgccaagctagagaacaccaatcagtcaaaatccaagaagaaactaccgaaaaaactcaaaccaaaaggctcagtaacccatagaaaaggcagattagatgtaactcgtgctatctcgcttctaccctatgacggtaacgtgacctttaatgctaaaagtgggacaaaaactcgaacatcaatctatggaacagaatttcacgcaacccgctatcaatttggtttaggtattactccagagtcttgtcaggataaatctagagttttggctttattagatgcgctagtttctatttgtcgggtaggtggtaatcatggtaggtttctttttgattttgccccagaaagtattgttttgcgttggacatctgattttacccctcgctttctttattgctttgaagaagacgaaatggataatatttgcactcctgaattattaaggcaaataagaagtggcgatctcgagcctacagaattttggatctcaggtaaaatagccgaaaatttacagggttctgaatattcaaaagttaatcaattttcaggaattaaagctatggtagatgcgttgaaacagaaaattgcttgcgatctgcaattttgtcttctcgatcaaaccaatagaggagaaaattagatgatgatcgcccttcgagttgatgttcccatcgcttcgtttcctacttcccgcagtcgagaataccgcgaaacttatcccgttcctcctccttcaactgtttatggaatgctcttgtctttagtaggggaaacagatcgatacaaacactgtggagtcaaaattgcgctcgctcttttatccgaacctgctaaatcaataactttaagaaaaactcgaagatttaaatctcaaaaaattgaccacaaagaaaatactagacccgatttccaagaaatacttacaggaatcgaatttattgtttggattgatactggagacgatctagctcaacctgatttgtgcgatcgcataacgggagcatttgccaatccaggatcggttcaacgatttggtttgttatgtttgggagaaagtagagatttagttaattccatcgatttattagctacaacagatttcgagcaacctctacaatatttgattcaagatgattacggttatttatctctaccttattgggtcgatcgtgtcggttcgagcaagactcgttggttaaactactcccttgaagctttagaagttcagcaacctcctcattctgcatggacaaagattcaagctccgtaaatcaaataatttttgcaaggatatacaattgttaatttatattggggagtcacattggcttaaagccttggtatttatgcagttaagttttttttagagcgattgagatgcttgaaaaatgctgcgacctctgagatgattgagtcgtgcagtgtactgttgactaattttaaaaagattgttttgtattattttgattacaagtacaattcatgattttttacttcagagttatttcacagtcaacaatttagaggttgcagggcaaccagattagatgtcgtcaggcgttgtgaacaagagttttaagtatgaattgaaagtgacaggactcgacgggcaaccagattagatgtcgtcaggcgttgtgaacatcaacgagattatccgcagttattgtatccgcaagggcaacaagattagatgtcgtcaggcgttgtgaacggaaattgccccaggggtggcttatcccaagtttgctgtaaccagattagatgtcgtcaggcattgtgaaactaatctaactaaattgtttttatcttattaattgtttacacaataaatattaaaaattgattccctgtaaggcgaattatacttaagtaatttaacctaatatgtaatttaaacaacttttttttggcaattttttgtaaaattctcttaaacaaataaagtgttctcaaattagtttgatgcggttttatcaagttaagtaatactaacgttacgttacttatctattagtagttaaagtcggaattaatcattaatttagatttgcctttatggttaactccactgtacttgcgccaggggcaagagttgttgttcgagatgcggaatggctagttcgtaaaactctcaaagcttcggcgggaagtagagtagtaatagaacttgttggtgttagtgattttattaaacatgaaacggcacaatttattgccgaattagaagaagatttagttgttttagacccaaaggaaactaaattaaccgtagatgattcttctggttatttaaagtctttattatttatcgaagctaatctaaaacaaactgcgcctactgactcaaatctctacattgggcataaggcagcgatggatgttttaccttttcaattagacccaagcttgaaagctttagaaatgtctcgtcaaagattattaattgccgatgcggtaggtttgggaaaaactctggaagcgggaattttagtatcggaaatgattcgacggggtaaaggcagacgtattttagtcgtgacgactaaaagtatgttaacccagtttcagaaggaattttggtcgcgttttactattccgttagtacgtttggattcagtaggaattcaaaggattagatcgcgtattccgactaatcataatccctttcactattacgatagagcgattgtttctgtagatactctcaagcaagatcgctcgtatcgtacctacattgaaaatgcttactgggacatcattgtcattgatgaagctcataatgtagcacgtcggggaaggggacaaagtacctctttaagagcaaaattagcgcaaagattggctactcgttctgatagtttaatcatgctgtcggctacgcctcatgatggacgagcagagagttttgcttctttgatgaatatgctcgatccgacagcgatcgcatctgagtcagactacagcaaagacgaaattcgcgatctctacgtccgtcgtttcaaaaaggatgtcaaagaccaattagccaagaactttcccgaacgaaacgcgatcgcaattgaaagtaatgcctctagtttggaagaatcagcttttgagatactcgatggtttaaaactttcttctatcgataccaaagctaaagctggaatgttgtttaagacaactttgcttaaagcgatgttatctagtccgatggcttgtctggagactgtagttaaacgcattagaaaactagaaaaagaggaaagacgggggaacgaaatagatattgaagaattgaagtgtttgcaggaggtattagagaaaattaccgcttctaaattttctaaatatcgacaactgctgtctgtaattggggaaaaagataacaacgggtttgggtggaaagggacgaattctaaagaccgtattgtaatctttaccgagcgtttggaaacaatgcgctttctcaaagagaatttaagtaaggatttatcactaaaagaaaatgcgatcgccacattagatggaagtatgtccgatgtcgatctgatggagattattgaagagtttggtaatgaacagtctcctcttaggttattaattgctacggatgtagcttcggaagggattaacctccattatttatctcatcgtcttattcatttcgacattccctggtcgttaatggctttacagcagcgcaatggcaggatcgatcgctacggacaagaagaacaaccacaaattcgttatttgctaactcgttctaataattctcgtatggatgaggtagagagaattattcgggttttattggataaggatgaacaagcagttaaaaatatcggcgatccttctgtatttatgggtgtgttcgatgttgatgaggaaataaaaattacttcggaagctattgagtcgggaagatcggcagaagattttgctagttccctcgaaccaaaacaacctgaagatgacgagtttgacttctttgctttattcgatgagccagaaataagccaagcagtaaatattgaaaataatctcgccgaaatgccgagcttatttgaggatgattttagctatgtaaagtctgcactagagcaactaagacaagagcaaaatttacagctaaatattattgaagaggaactgtcgatcgagttaaccatgcctcaagagttacggcaacgctacgatcgcttcccgaaagagattttacctgacaagaacgaaccattgaggttatcggcggataaaatagcgatcgctcgtgctttagatgaagctagacgtgctgaagatagttggtcttcgctgcaatatctctgggaattacaccccatagttacttggcttaatgacaggggagtaactttattcggtcgtcaccaagctccagtaatcactttagcggataaattagcacccaaagaagttgtctttatcatctctggggtaattcccaaccgcaggggacaaccgttgattaataagtggttgggagtagtttttgaagggaaaaaatttgtcagagttgaagaatttactactacacgcgatcgcactaacttagggaaagaacccatacccaataccaatcaaccgatagacgagtctttattagaattgcgatctcaagctgtggatgaggcgactaaagtaattcttgcagcaaatcgagaatataaccagagcatcgacccgatattacagcagcagttagatcgtttagagcaattgaagtgggaacataatcgacaactcgaactaaagtttgagaatactaacagcctaactaagagcaaaaaagaaaaagcccaacagcgtatcgagcgcattttcgatgactattacaactgggtacaggaaagcaccattacagaagaagttccttatagaacccatttgagatctcacgaagagactgaaagccgcttaagcattaatctgacgaagcagagatcgatcttggcagtcgcatgagataaagttcgctcaacagcgcgattctacaagcggaggaaacctccgcgtatctcgcgctcaaagtttttaaccaaacttttacaacgctccatccaagcgtttgagcgttcaatcacccagcgagcaacagcaggaacaaatccagatttcccttgcgctgccttctcttgtttcgagggtttggtggacagttcaaacttgattttcgtcatgatctcgggataaacttgctccaattgctcagtcaaatgttcgggatgatatccgtggtctagcaaaatagtgagcttcggaaggttaacgggttttgactggaaatagtcaatatttagcgtcagcatctcaatcaatcctgcatcatccgagacatttgctggtgtgcagtgggtaaagaaaggaaatcccagtgtatcaattgccagatgtcttttaatcccattcgtggctttgtaaaaacaaaagcctttggaagcgacactggcattacaggtatttttcacggcttgagagtcaatgattattaatgttgtccacttaggttttttttaacctgctgacgtacttgttcatgtaaggcattcatgagcttttcaaacacccctacctttcgccactgcttgtagtgccaatagacagttgagtagggaggtaaatctttgggcaagtctgcccaattacaaccatttttgagttgatagagtattccgtcaaggatttctcgccttgtccaattggcaggtcgggtttgcttcttagtcggcaatatcttaactaacaggggttctagaatttcccattcttcatcgctaaggctactggaatacttcatggtcaatgaattttgatactttcgagaactttaagtccatacttggaagatgtcaaatgggttctatatcaaaatagtcgcagttttaagcagtagtggatgattaataactccaacttattacttattaactattacttattacttaaaaaagatggctattttaactggaataaacaacgaaaacgaattttattcgcatcactatttagatgctattttgcagcaagatatcaaagatgttgtcaaacgctggaaggaacgagaagaagaaacgggagataaatctccaccaaaagcgatcgcatctttgaagactgattactttaaaacttgcagtcagatcggtcaagaaaaagacattcaagagcgattattgcttcaaagggaatggtttagtagatttttctcagtattgggttatgagtttaaaccgactgagaaaattttggatgatgacgaaataattccgatagttgccgaagttaataagaataacggacagcctttactgtggattattgaagctgtttccgatacagaagaagcagttgatgttctttctctaagcttgaatcaggttcaatttggtaatgatgagcgatcgcctcagccgaatccagaactactcaacatcgactttgaagacttaatctctgactatatctttgctcaaaacgatcctcctcgttgggttattttggctggtattcatcagatagttttgttagaccgctttaagtggaatgcttcgcggttattgcgttttgacttaggagaaattctctctcgtctggataatgatgctctgcaagctaaggcgattttactccatcgcgaacatacctgtcctaatgagggaacggctttactcgatgagttagatgaaaattctcacaaacacgctttttctgtctccgacgatctcaaatatgctttgcgggagtctatcgagttattagggaacgaagcggtttggtacaagcaaaacaagcttcacgaaggggtatatagaggaaaactggatgaaggacagttaaccctagaatgcttgcggtatatgtatcgcttattgtttttgttttatattgaggcgcgacaggaattgggttatgcgccgatgaattcggatatttaccgccaagggtacagtttggactttttgcggaatttagagaatgtcgatctacgcactactgaagatacagaaggttattttatcgatgcttcgattaaaaagctgtttaagttggtttgggaagggtatcccgaacaggattatgaacaattgagtttcgatttaaaacaacaagaaattacccacgatacgtttgaactaaagcccctaaaaagtcatctcttcgatcctgcgcgtttatctttactcaataaagtcaagtttcgtaatgtagttttgcgtcgggtaattgaattaatgtctctttcgagggcgagtagcggtaagagaagaggacgtatttcctatgctcaattaggtattaaccaattaggcgcggtttacgaagctttactgtgttttcggggcttttttgccgaagaagatttatatgaagtcaagaaagccgatgataaaaacactgatgaactaaaggtagcttattttgttaagttaccagatttagaaaactataccgataaagaacgagttttcaatgatgatggtacgcctaaatgctaccccaaaggtacttttatctatcgtttagcaggaagagatagacaaaattccgcttcttactatactcccgaatctctaactcgttgtttggtcaaatattccctcaaagagttactcaaagataaaactgctgaggatattctcaagctacgtatctgcgaaccagctatgggaagcgcagcgtttttgaatgaggcgattaatcaattagccgaggcttatttagaactcaaacaaaaagaattagatcggcgcattaaacaagaagattatctgcaagaaaaacagaaagtcaaaatgttgctggcagatcgcaatgtatttgggattgacttaaatcccgtagcagttgagttagccgaagtatccttatggcttaattccatttatcaaggagcgcacgtaccttggtttggaatgcaattacactgcgggaattctttaattggggcgcgtcgtcaagtttacgataccagtttaattcctcaaagtaacaggcacaaaaactattggtatgacaacgagccacagcgagttttattaacagaagaacttccagcaaaatctatctttcatttcctattacccgatcctgggatggctaactataccgacaaggtaattaaacaattagcaccagaaaacatcaaaaaaattaaagattggcagaaagaattgtgtaaagaagcttacgaaggatttgaaatcgaacagttagttagcttaagcaaaaaaattgacgaactttggcaacgtcatgtcaaagaacagcgtaatatgcgaaatcgcaccaccgatcctttggctgtttttggacaagaagaggataagttacagcgcagcaccttgaccatgaaagacaaaatcgtggctcaagaaagaatgtccgaaggtgtgggtaattccagtgcttatcggcgattaaaactggtaatggattattggtgtgctttatggttttggcgcgtcgaaaaagcggatttattacctactcgtagtgagtatttaatggagcttttcgtcattttaggcgaaagacccatcgtcccagaaaaacagttagatattcctttatttcctgaaactttaccagaagcagaagcaaaagaatttatcgatcaatatggttcggttgacttaaaaacactctgtagccgttatgagagattgcagttagtagaagaaatagccaaagaaaaaagattcttccactgggaattagaatttgccgatatttttgcggataataatggctttgattttatcttaggaaatccaccttggatcaaagtggagtggcaagaaggtgatgtattaggcgatgccgaacctttatttatactgcgtaaattttctgcgagtaagttaggaaaattaagagaagagactttaactaaatattttcagttacaagctgattattttaatgtttatgaaggttgtgaaggaacgcaaaattttctaaatgcttatcaaaattatcccttattaaaaggaacacaaactaacttattcaagtgttttcttcctcaaggttggtctaatagtaacgaaaatgccgttcaaagttttttgcatcccgaaggagtttacgacgatccaaaaggaggaattttaagaagccatatttatcaaagattgagaaatcattttcagtttcagaatcaatttatactttttcccataggggatagaaataaatacagtattaatatttttgggcgacgacaagaacaagctgattttataaatatttctaatctttttgctgcaaaaacaattgatgcttgttacgaacataatggaacaggaaaagttggtggaattaaaaatgatgacaatgagtggaatctagaaggtcatcaaaaaagaattatcagggttaatgaagatcaactagctttttttgcaaagctttatgacaaagaaaatacacctgctttgcaagctcgtcttccagcaattcattctcaacagttgattaaagtattagaaaaatttgccagacaatctctttatctaagtgattttcaaaaaaaatattttactacacagtgctggaatgaaactaatgctcaaaacgacggaacaactaagcgaaatacttgttttcctgaatcgacagatcaattaattctttcgggtcctcattttcatataggaaatccattaagtaaaacaccaagagaaatttgtgcagaaaaaggacactatgatgttttagatttaaataccattcccgatgactatctacctcgtactaattatgttcctgcttgtaatgttaatgagtatcaaaatcgaataccacgagttaattggattgaagaagaagaaagcgaaccaaaaaaagtaactgagtattatcgtttcttaaatagagaaatgctttctcaatcgggagaaagaaccttgatttcaactattctaactaaagataatacctatattcatacttgtttaggaacagcttttaaatcaaataaaattttacttagtttttatagtttggcattatctgttcctctcgattttagagttaaaactacaggaatgggtcatgcaaatatatcattgatagaacaattacctgttttatcttctgactctaaatacaaatacagcttacatttaagagcattatctttaacttgcttaacaagctactacgccgaactttgggaatcaatctatacccaagaattcaatcgagacacctggacaaaacaagaccccagattaaataaccaattcttccaaaacttaaccccaaactggcaaagaaacgtcgccctccgcaccgactacgatcgccgacaggcattagtagaaatagacgtactcgcagcaatggcactgggtttgaccctagacgaactgatcaccatctaccgagtgcaattccccgtgatgcgccaatacgaaaaagatacttggtacgaccaaaacgggcgcattgtcttcacttccagtaaaggacttccaggggtaggtttccctcgtactgcacccagaggagaaacgggttgggaagatatcaaagataggtcatcgggaacagtagaacgcactatcgaagataacactctaccaggaggtgctgttaccagaacaattgtgtatgaagccccattcgatctttgcgatcgcgaagaggattatcgtattgcctgggcagcttttgaacaaaggggtttgaagtaataagtaaatttgttgtgagtgattcaaatttatcaatacaagaaagagcagaaaattttgcaatcagagttattaaagcttatgtggaactcaataaaagaaaatacgatgatgcgggaaaagttctatcaaaacagtttttacactctggcacttctattggagcaaattgttctgaagctgtttatgcccaatcaagaaatgattttattcacaaatattcaatatctctcaaagaagcaaatgaaactaggtactggataaatctaatgattaaatcgcaaatcgtgactgaatccaaatttactcccatgcttcaagaactagaagaaataatcaaaatattgaccgcatcaattaaaaaactaaaagaaaactaaattaaaaacttattacttattacctattacttattactttattaaatgattccttcagtattagcaacagaaatccaagccagcattacagattttttaaagaccgaatttcgctcgtcttctcctggttttgaagatttaatcgatcgctttttagataatccagaagcaatttttaaaggaccatatttatctgccagtctgccttttagatcgggaacttcgggaatcgattattttcccgacgtaccgatggcttttcctccccatcgccatcaagaacaagcattcgggcgactgcaacaccctgattatcagtcaactatcgtcgctactggtacgggttcgggtaaaactgaatgttttatgatgccgatccttgaccactgttttaaatatcggggcgaaccaggtatcaaggcaatcttaatttatcccatgaatgccttggctaccgaccaagctaaaaggttagcacagttaatttggcacaattccaacctcaaaggttatattacggctggtttatttgtgggggaaagcgatcgcgaacccacttcggtaatgacagaaacgggagtaattaccagtaaagatattctgcgccaaagtcccccagatattttgttaaccaactacaaaatgttggactatctgctgattcgtcctaaagaccaagggttatgggttggtaatagtcccgaaactctacgctatttagttgtagatgaaattcatacttttgatggcgcacagggaacagatttagcctgtttgattcgtcgtctcaaggctcgtttgcaaacacccgcgaatcatttggcttgtgtgggaacttcggcaactttaggcggaaataaagacacggggaatgaattaataagctatgcaggaaagatatttaatgagacattcaataataacgctatcgttaccgaagataggttgagtgcagccgaatttttagccgatgcctttatcgatccgcaaccagtccccagtccagagttactagactctttactaccccaaaactatgacagtgtagaaaaatacatccgcgctcaatatcagttatggttcgatcgcgaacttaccgatgattggcaagaaatggagtggcgtattgaattaggcgatcgcttaaaatctctacccatagttaataacctactaaaaatcctttcaggcgaacctacttctttaccttctctttgggcgcagttgagtcgcaaaatgcgtcttcctgagagtaagggcgattcgccaatcgcccctacaatatatcaaaccgctttacttacgagtttggcagctttattttccctggcacgaaatattaataaccgtccttgggcgaatatccgcattcaactctggctgagggaattacggcgtatggtagctaatatcagcgatcgccccgaactaacttttgctgacgatctaaccaatgaggaacaagggcgcaatttacctttagtccactgtcgcgaatgcggtgctactggttggggtggattgcgtcgcaaacaaagcgatcgccaaattggctgtaacttaaaagatttttaccaggctttttttagtaaaagtcctctgatttcttttatttttcctgctaaagaagatatggaaagacggcgacaggaacaaggagaaagaaagaaattatgttctaattgcctcagtttaaatatttctagtgccacctactgtcatacctgtggtagccagcagttattatccgtaaccgaacccaacctcattcgagaagttaaccgtaacggttcgagatggcgcgaatccagtcatgattgtcctatttgtggcgcaaaaaacaatttagccatcttgggttctcgcgctgctagtttagctagtgctgccattggcacactgtttgcttctagctacaacgacgatcgcaaattaattaccttttccgattcggtacaagatgcagcccatcgtgctggcttttttactgcccgtaccttccgtactactttacgtactgccctgaaacagtatttagaccgtcagggtaacggcaagaatttagagcaaattattcccgattttaaaacttattggcgacaagaattaggttcggataccgattatgtcgctacctttattccctcggatttagagtggttgggggaatgggaagaactaaaacaaaaaggaacttgttctgccaatctcaaagaattatgcgatcgccgtttggattgggaaattatttccgaattaagtctcaaaacttcctttggcggttctttagaaaaaacgggtacttgtgcaataggaattaatctcgaacaattagatcgagctacagcagaagtattaattaaactcaaaaatgaactaggactgcatcatcttggaaatgaaaagataaaacaatttatcttaggcatcatttatcacatcaggcaaaaaggcggaatcttacatcgcctcttagatatctcaattcagcaagatggaaaattttaccttctgcaaaatcagattttcatgcctggtataggaccagcttcgataaaacctgtttatcccatagaagcgagaagccatgaacagtttgaaccagttatacaaaaaattactccttggtgggaaaattgggcatttaaaaacttcttcgatcctcaagaagctactttaattggcgaacaaataccagtaatctatcaacatacttttaatactctagttgaattgggaattttaggcgatcgctatactaataaaaacgccaaagtttggggaattaatttagcagccttgcaactggatacccaaacgattcatctctcttgttctcattgccgtcatagtatcgtcagttcgcctacagaattagcttactggcaagaaatgtcctgtctgcaatcccaatgtcagggacggtatcaaatagacaataatcgacaactaaatttctataaaaatctctactccaaaggcaatgtctggcatatcttcgctcaagaacatacgggacttttagaaagagaagtaagagaagaactagaacgtcgctttattaacagtcaaaatcgttccgaccccaatttactctctgccacctctaccctagaaatggggattgatattggggatttatcttctgtcttactctgttctgttcctccccaacaagctaactaccaacagagaatcggacgggcgggaagacgagatggcaatgcctttgttactactattgccaacggtaccaatcacgacctctacttttggtctgaccccctcaaaatgattgcgggaggagtagaaaccccaggttgttatttagatgcttcggcaattctccagcgtcaattaactgcttattgtttggattgttggattgcacgggaaggaaatactttagacttaccagaaattttcaatcgggttttagcatcagtacaacagggcgacctcaatcgatttccctacacttggttgagttttatcgatcgcgaaagagaacaactattaaatggttttgttcgactatttgcccaagaaattggcgatcgcactcaacagcaattagaaatgtttatctcccaaggagaacgagatgaaggggggttacgctggcgcattctcaaccgacttcaagaagtagtagaagaaagaaaaagactgcaaaatcaaattagaacgctcgctcgtcgcataaaagagaaagaaaatggtgctaaatcccaaaaccacgaagaagaactggaagagttaaaacgagaacgaaagggcttcatggatttggtgaagcgaatcaacaacaaaaataccctcaattttttcaccgacgaagggttacttcctaactatgcttttcctgaagctggggtaactctcaaatcaattatctggcgacgcagaaatactagtggaaatagttctacgggtaaatatgaaacctttacctttgaatacgaacgtccatccgcattagcaattggggaactcgttccttctggaaaattttacgccgaaggtcgtcgcgtcaacgtagatcaaatcgatctcaatctttcggaaatagaagaatggcgattttgtcgtaactgtagttacgccgttcccaatatttaccaagaagccaaacagcgaacctgtccccgttgtggtgatgtaatgtggtcggatgaagggcgcaaacgtaaaatggtacggctgcgtcaagtaatggcaactactaaagatcgcgatagtcgtattggtgacgacagagacgaacgaactccagctttttttaccagacaattactagcagatttcgaccccatcgttagggaacagtcttatttgatagacgaagaagaatttccctttggctttgaatttctctcgcgagttaccttccgcgaaatcaacttcggtcaaattaccagccaggcagaaaccgtagaaattgctggcgtagcccgtgccaggtctggttttagtgtctgtcgcagttgtggcaaagtccaaaatggaggcgatctcgaagagatccgcttcgcgggacgcccaaatcatactcttgcttgtattcataaaaatagcgacgatccgcgccattttatggatgttctctatctatttcggcaatttgaatcagaagcaattcggatgttgttaccagtcgatacgttgaactctcccatacaactgcattcatttattgctgctttacagttgggtttaaaacttcactttcaaggaggagtagatcacctgcggactcttattagtgaagaaccttctcccaacagttccctacgcagaccttttctgttcctttacgacaccgtaccaggaggtactggttatctcaaacaactactccgcaatcgggatgaattgatttctgtatttgaagaagctcttaccgttcttcgcagttgtagttgtgaagatggctgttatgactgcgtatttgcctatcgcaataactttgaacaagataaaaccagccgtcgtagtgcgatcgcaattctcaatgccattgttacccgtaaaaacaaaattactactttagagtcgggattatctactgttaaattaaatgccctattcgatagcgttctcgaacagcgttttatcgatgctttaagccgttatcgctatcaagaccgacctactattctccgtaaagaagtaattaatggtaaacctggttatttactttctattggcgaacaaaactggcagatcgaacctcaagtagaactagaccagaatcatggagtagctattcccagtcgcgccgattttgttttttatcctgttaaagaatcgcccaacatcaaacccatcgccatctttaccgatggttgggaataccacagcgatcgcttatcacaagattttcaacaaagaatggcgatcgctaaaagtagtaattttcacgtttggtcactcacttggtctgatgtcgagtctcagttcaattcccaagcaggggcttatgtcaatcttttaacccaagagcttagtgaaaaatttcgcagtaatcaaaataaactttatcaacaatccaactgcgaacagttacggcatttaaaagacaaagatagctttatttggctgatccattatctgagcaatcccgagcgtcaattatggcagcgatgggctttattaagaagttttgcttatattcaacaagagcaatatcaaaatcttagcgatcgccatctctgggaacaagaagtaattaacttaatagactcaaaaataattaatagcttcggtctcgatctttctgattatttagctaatttgagttggaattcagcacaatctaatactttgattaaatcttatatagcgattaatccgaagaagtttaattctaaagacggtaagagttctttaatggtgatatctcttagcgatcgctttcgcgaaatcgatgatgagatagtcaaagcttggactggagttttacggcaatacaacctcttccagttcctcgattacagctatatagttacctccagtggttttgaagacgaaacagaactgggacaattctggcttccgcctcctacagatagggaaaaaccttcaaataatagcgatccgatttgggaacagattaaaacccttgtcttcgagccagatgcgatcgctttaattgattatatggcaatccataactggcaagtacccgaagtaggatatgaacttaccgatgataccgatacagttattgccgaagcagaattagcctggagcgatcgctacttagctttagtaatagattcaagcgaaactgaaatctttacccaaaacaactggacaacactaactatagccgaagtcttaaataacccagaagccttttatcatcaacatctagccaattaaaacttattacttattacctattacttattacttaaaagaagatgctaaaccacaatatccgaatggcgatcgctactgactttttagatgcttttagtaagctaaccaaacagactcaagctaaaaccaatgcttttattagtaaatttaaacaaaatcctactagttcgggcattaactacgaatcaatccaaaatgctgccgataaaaatctcaaatccgtcagaatcgacgttagctatcgagcgatcgttctcaaacccgaaactggtaatacttatctactattatgggtagataatcacgatcgagcttatcaatgggcgcaaagaagagtttgtaaaattaatcccgaatctggtgcattacaaattattgatgtcgaagaagtagcagcgattgaaagagaaatagaagcaaaggctaaaacatccgccaaaaaaagatttgcagatattcacgatcgccatttattacgcttgggagtacccgaagaattattagcagcagttcggtctgttattaccgatgatgatgtagataaattaatttccaaattaccagaagaagctgccgacgctattttattactcgctgctggttactccctagatgatgtgctaaatctacaggacaaaaaaagcgatcgccaaattaatacagaagacttcgatgcagctttggaaacaaatgatagtaagcgtagattttatatcgtcgaagatgatgccgaattagaagaaatgctggctgcacctttagaaaaatggcgcgtctttctccatccaactcagcgtcgtttggtagaaaaagagtggaatggggcagtaagagtattagggggcgcgggtacgggaaaaactgtagtagccatgcaccgagctaaatggctagcagaacatcgttttaccttatctacagatcgtattttctttactacttatactcgcaatttagcgatcgatattgaaaataacttacgcaaaatctgttctccagagataatgcgtcggattcatgtagaaaatatcgatagttgggtagtgaattttctcaaacaagaaggaattaaagcccgaattgtttacgaaaacgatttagagcaattgtgggaacaagcttatactcttgcgccagaattttccctagctttctatcaagatgaatggcgtgaagtaattcaaccctaccaagttaaaacacttaaagaatatttaaaagcaccaagagtaggtaggggtactagactcaatcgagccaagaaagccgaaatctggggtgtatttgcggaatttaactctctccttcaagaaaaaggctggaaagatcgacaaactgctttgagagatgcttgtagcttactgaaaaataagcagggagaaactttaccttttaaagcagtaattgtcgatgaagcccaggatatgggtacagaagctttttccttactacgagcgatgattccagtaggaccaaatgacctatttatagttggcgatcctcaccaacgcatttatcaacataaagttgttttaagtcattctggtattgaaatacggggacgttctcgcagattgagattaaattaccgaacgaccgatgaaattcgtaaatgggcatctcaagttttaattggttctatctttgacgatttagacggcggacaaaacgacttgaatgactatcgttctttacttcatggcaaagaaccgtcaattaagggatttacaacctttaacgatgaaattaaatatattaccgagcaacttcaacgtatcgaacgagaagaagatactttatccagtagttgtttaattctacgaaccaaatctttaattgactcttattccaaagctttaaatactcttggtgtcacaacttgccaaatccatagaagccaagcggacgatctgacaactccaggattaagagtagccacaatgcaccgagttaagggattacagtttgaatacgtgcttttagcaggtttgactaaagacgaacttccaccaaaaagaatacttgatcgcttgtcagataatagagcgcgtttgtctttgatagaaagcgatcgctgtttgcttcacgtcgctgctactcgcgctaagaaagaagttttggttacttatcacggtcaaccaagcgagttattaggttgttagattcgcgatcgcataatatctaaattgttctagataggcgatcgcaaaataaaaaataatttctcatttatccccactgccattgctgttgttgaagctcttgttctacctcctgagattcggatgtcatttctcgtgctgcaatttgattacccaaaaccgcttctaaatctttagttaaatccagacaggacattcctttaactccccgtatctcaatctttacctgtccgtctttttcgataaagacatcaatttcctgaagttccattgttaattagctcctatactacacgtcgtaacactagatgaatgcgatcgccttcttgagtttcttcattgatgagagaaaatccctgttcttctaatttggctttggctgcatgatagggtttgagtcaatctttgcaatacggtttctagttcctcattttggggtaagggatattctaaaataaccgcttcatctttcaattccacgggaatcttccctgaaggggcagtaatcaaaattgacttcttactaaacttaagccgttgggcgacgctgcgaagtttacgtttaatttggggattagtccaacagtcgtgaaaatctttaagtacaaataaactatctccttcagctttatccacctgttccaatgccgaaagggggtctttagctgaaggaatcgaaccccgccaattagttaccgcactaaacccatcagcgacatcccaactgagacaggaacgctgagtgcgctcgcgaagagcgaacccctcgcatacctgcttgacgctctgtaatgccctctcttcctctggcgttaccaagatcattagagtaaagcgcgatcttaagtaaatgtccagttcctgctcaaacgccatactttactcctccagagcgatcgctcttttgtaacagccgtatttttcccgaatataactattcattcccagaaacgtaaattcgggtaattgcggaaatattaaggagattcaaagcaaggttgctcttatttgcctgtttttaccctcaattactgataaatcctatttaatcaaaattttgaatttgagagaagttcgattagctttgtcgttcctcagaaattaattcggtaacaattgagtttggttattacaaataaacaatagagctttttcaattatttttttaacaaatagttaagttgacagattgcggtcttaaagaaatttgccctgactagacgattgattctgaacaaaaacaagatgacgaaactgagctaataattcttgttcgattctagttaatactttgtagttgttgcattcgatccaaatgacttgaatatcggagctttttggagttttactagctttaattttttctagtttttcgataaaagtctgctcggcaaatcttttttttaaattagaactagaacccaagtaggcaaactgagcaaaatctgttgccaaaaatgcacccattttttctggtaagcgatcgcgttctgttaaagataacgaatgtgttagggaaattacaaactcttcagataagctactttgctcggctaatggaagcgaacctcttcctacttgttcgactaattccgagcgcgacaaattgagttcctgagaaagtcgatctaaccccgcgatcgcagttggcgttaaggacaaatttactctctttttgacttcatcatgaagttctgggactcctttcgatttcttttgtcctttaggcattatgacaagttttttaatcaaaaaaattggtgaaaacttctttagtttagtctcgatttttaatttaattgtgactcaattgagtctctcaatattttattacattggtttttttgcaattgttggggctggattatttgagtttgacgaaccgttttcatcagtaaagtaatgtttacaaatcttttagattatacgtattaaaattgtgtatgatctaaatagcagaattacaaggacatagttcgatgttgtccgaaaacgattttcagcattggtgcgatcgcaacaaaatatcagaggaagcaaagcaagagatacaaattattcgctcatctgaaccctctcgtaaagttggaggaggaaagcgaagtgtttctggaaggtattcaagccaaaaaatgggcgttacgattcagtttgaatcgcataaagtagaattgcccttcatttatcagctagaacacgatgaagatgttctggaatactacgatcaaccgccaccttttaaactgagctatcaatctgagtctggaaaaaacattggatttttttatactccagatttttttgtaatccgcacagatagtgcaggttggtgggaatgtaaaaccgaagaaaacctccagaaattagcccaaaaaaatcccaatcgttattttttagatgatgataatcattggcgttgtccttctgccgaagattatgccaatcggtttgggtgggacttttctatttggtcgagtgctagcgtaaattggacaatgcagcgaaacttagaatttttagaggattactatcgactaagaggcagaaaaaaacttaatgaatctagttttattgcaattatttcaattattaaagctaaaccaggaattactttattagaattatttcatgtctctgaaaatatcgaggctgatgacatttaccatttgatcgcccaagaaacaatttacctcgatttaagtgttgcccctctagtagaacctgaaaaatgtttactattttgcgatcgcgttacggctttatcttatagtgctattactgcttctcaagccacaaataatacagttatttctccaataattgaccttaatgtgggaaatattgttatttacaatggtaaagctctaactattgctttaattggcgaagataatatacttttgcaaacagcagaaaatcagtctattgagtttcctcaagatacttttgaaaatttaattcgccaaggaaaaattactagcttccaaaagactaaaactaatgaaatcgatcctcaagctttagagttattacaacaagctagcgaaaaagacttaaaagatgccaattatcgttatcattcaattcagccatatttaaatggtgagcctattagaagagatactcctcaagaaaggtctttgagaaactggttgtcagcatataacaaagctcgacatcagtatggttatggttatcttggattacttagttttgaacaccaaaaaggaaaccgtaacagaaggttgcctcaaaatattttagataaaatcgacgattttattgaaaatcactacgaaacaaaaaaacaaccaacaaaacaatcgacctatgcagcttttgctaatttttgcgctcaagctggaattcccgattgccaaatacccacctataaaacttttatcaaagaaataaaaaaacactctggatacgaacaaactctcaaaagagcaggttctcgggctgcttatgaattagagcaattttactgggaattaaatctaactacccctcgtcatggtgatttcccttttcatatctgtcacatagatcacacacaatcggatattgaactgagatgttctaaaacaggaaaaagtttgggaagaccttggattacttttcttgtagatgccttttctcgtagcattttagctgtttatattacttacgacccgccatcataccgttcttgcatgatggttttaagaatctgcgtacaacgtcatgggcgattgcctcaaacaatcattacagataacggtaaagagtttcatagcacttattttgagactcttttagctatgtttgaatgtactcttaagcatcgtcctgctgcaaaatccagattcagtggggtttgcgaaagattatttggaactactaatcaacagttgctctacaatttagcaggaaatactcaaattaccaaaaaagtcagacttgccactaaatcggttaatcccaaaaacctatctctttggaatattggtcttttatatctttatctttgtgagtgggcatacgaagtttacgagacaacagaacatcctgccctagatggttatagcccgagagaagcatttattaatggggtcaaacagtttggtaatcgcgatcttcggcgaattgcttacgacaacaattttaaaattttaactctacccaccacatcccaaggaaaagccaaagttagaccaggaaaaggcgtaaagatagagtacaaagattactggcacaatgctttgcgcgatcccgaaatagaaaacaattgggtcgatgttagatacgacccttttaatgcgggaatcgcttacgtttatgttcgaggtcagtgggttgaatgtattagtgaatattatcctttatttcgaggacgttccgaaaaagagattcgcttggctactgctgaattgaaaaaacgccatcaaaatcaccacggcaattacaaaattagagccaagcaattaggaaattttttagccaaaacagaaacagaagaaatactgctagaacagcgtttacgcgatgaacagactcatgaagtttttcgagttattgagggaggcacgcccaatgttctaccttttacttctccgacgataaccgtcgaggaaactgttaacactcgctcgaaaccaaatatgccagtagaagagaagtcttcatctgatgcgatcgagcctcccaaatttaaaagatttaaaaaatattaatcatgtcttcagaaagagaatttcctttagagctattaaaagccaataaagagcatcgtcttaattactacgatgaatatacaatggctcatcctttcttagatcgagcttttgaagacctcaagcctctagttcggcattgtggagaaacaaggctaattttcattgtcggtccaacaggagtcggcaagactaaattgagacagctaactgaaaaatggattttagagaaactatgggaatcaattagaagtaatatgggtcacttagcagtagccagtgtggaagctgtattgcaaaaatcgggtttatttaatgccaaagaccacctcaaacgctgtttgtatgctcttcacgaaccagaagaatttatcaaaaacaaaattaattatggggtcgatggtatttatcggactgatgaaggaaaattggcaattaaatcgagaatcttagaaaccgatttaggttgggcattagagcaagctttaaaacaccgccatccacagattttttttatagacgaggctcatcatatgctggcggttgccagtggacgtaaactgacagaagtaccagaagcgatcaagtctttggctaaccgaacagaagttttacatggattgatcggtacatacgatctgttgactcttcatgatattggcgatcaattgagcagaagaagtctttacattcacttacctcgctatgatgccaaatttattgaagatagagaagattggcaaagtattgtctggaattttcagactcagattcccattgaagaagagccagattttgtatctgattgggaatatctttatgagcgaagtttgggttgtgtaggaatacttaaaaattggacaagaaatgcttttgccgatgcgatggaggacgaagcaaaaacagttactcttaagcatttagaacgacgagctttgtctatcggtcagtgtcgcaatatcctcaaaaaaatcaaagagggtgaaaacaactacgctgcgatcgaaggagaagttgaaaaacttcgtacagagcttgaattaggtattgagcctatttctaggacacaaccaatatctcaatcttattcaggagcaaatcaaacagctagtcaaaaaccaaaatctaaacaagctgtcggtcaacgtagagctaaacgcgatcgagtaggaatagataaagatgcaggataaaatcttcaaaaaatatcgctccctaaaattacaatgtacacctgaaaggtctagcaagttgtattctattactcctatagggataggcaattccttaattgaaagtcttaccagttacatttctcgacttgcattagctcattgtgtttatcctggaattttaatggaaagggttgtaagctcggttattgataaaaaatatagtagtgctgatatacataagctatatagttttactgatgctattaatggcactggtgtaatgggattagatattgttaatgctttagaaaagcttacttttcaaaatcggctttcgttactaactttgacaaatctatcagaattaattccttcacgaaaattacttcatgattataaattgtggtgtcctcaatgctatagaaattgtcacacacgcagcgaagaaatatacgaacctttgatttggaaattaaaaactgtagccgtatgttctattcacaatttgcctcttcaagaattctgtccttactgtttaaaaaaaaattatcatcttgcttggaaaactcgtcctggttactgttctcagtgtggacagtggctaggagaattgaaagcatacgatcaaagtttactggctaaggaaaaagatgaaacactaaattggcatctttgggttagtaaaaatcttgaagagttactgataaaaaactcatctcgtgatgttacctggtctaaaaatactattagtcaatctttgatgagatacgctcaacaaaacgctgagggaaatattgcagctttagcccgtcagttagaaatgccaaaaaatactgtttggttatggtgtaaaggaaaaaatcagcctactttagaaatgttattacgtatttgttatggtttaaaagtatcagtttggaattttttgactcaagaaaatttaatagaatcagaaaaagtacatttaatcgcttctccacctgagttaaaatcaaaagctaagagtaaagttctagaactcgataaaataaaagaatatttagagcaagtcataaaaaaagaaactatacctcctccttctatggaacaagtagcaagagatttacaatttcagcgacggactatatccaggcattttcctgaactatgtcgagtaatctcagccaactacaccaaacacagaaaagccacacatcgacaagcgatcgagagttcttgtcaggaagtacgagaagctgtcaaacaactgcatagtgaagggaaatatcccagtcacaataaagtagaaaagctaatttctcgacctggactattgagatatgaggaagtgaaaaaagcctttaccaaagcaaaacaagaattaaattttaaataattgcttcagttatcattttagtttgccttttgttgcgatctcgcaaagcgagccactgcgtcaacgcacgataccagaaacctttttagttattaactataatatttctatctaagtattgattatcgtgcatcggaagtataagatttccgcagtgcattagaagtataagctttccgtggcggaaaagttatgcttccagtgacaacacaacatttaataattgaatttacaacagatggagctaaccggactcgaaccggtg

SEQ ID NO: 899 - DNA, 16508 bp, Rippkaea orientalis
  source 1..16508: mol_type = other DNA; note = PCC 8801
caattagggaaaaagtaataaattttcatccttgccgtaacccaccgaattagatataaaaatcaattggaagcctaataatactaacatgaacattagcttcgcggcaaaaacaaactttaaataatagaaagtattatttaaagtttgtttttgccgtattttaaagtttgtttttgccactcgattctctgaaaccctagtaaaatcgttgtactaaaattctagcatgaccgctttttcaagtttgagtttgccgaaatcgttattttcaggtttgacattgccgaaatagttgggacttgctatgatggttttatcgtaaatttgtattaatttgaggagggacagccatgctctccgataccgaatttcaaacatggtgcgatggtatgcaactctcccaacgacaaagagagttaatcacccaagtacgcacctccccacccattcgcaaagtaaaaggaagtgccagaaacgttcatggtcgctatccaagtaaaaaaatgggcacaacgattcaatttgaatcccatacggttgaattacctgcactgtgcgaattctacgaatatgatgactcggttttagaatactgggaccaaccctataaattcacgattaaatgcgctcctgaaggaagacaagccaccacaattactcattatcctgatttcttagtcttgagaaaaaatagctgtgggtttgaagaatggaagaaagagacaaaactagaaaaactgagtgaaaaacaaccctatcgttatcaaaaacaagaaggaatctggattgatactattgttggtgaatatcttgaaaacttaggctattattactgtgttcgctcagatagagaaatagattgggttaagtatcgtaatcagaagtatttacagtcctacaaacacggatatttagaccaacagtatattattgatacagcagtagaagaagaacttaaagatattatcaatcataatcccgggattgacctaactactctactaaataaagcccaaaacgcaacgattgatgatattaataccttaattgcccttgagaaagtctatgttgatttaagtgtagtccccatcgaggaacaactcgataaagtccacttatttcgtgacaaagcaacagcagaagcctatattacggctacccacaattatagtgaaccgattacgggtagtgtgcaaatcgtgaatctcaaggtggggtcatctttcttactagatggaaaaagcttaacgattgaccatgtaggggatagtaaaattattcttaaaggagaacaaggaattattcgttggactcatgccgaatttcaacaattactggaactcggagaaattactcatctggaaacagaagaaaaacccgctttggatgaagaaggatggcaatattttgtcgaggcgagtccaaaagccttagaaacggctaatcaacgatattcagcgattaaaccgcttttagatggagaaacttatagttccttagacatagatatatcagcacgaactttacgccactggaaagctaaatatcaaaaagcgcaacaagactatggatgtggatttctgggtttaattcctcaaagtaaagggaatccaacgcctcgttattctgatgaagacgtagaatttgtcgataagataattgaagaacaatacgaaacgtttaagcaaaagaatgcttggcaaacctatcttaggctaagggatagatggaaagaatcaggaagaacttctccgattcctagtcataccttttattatgaaagaatcaaaaagcgcaatagttatcaacaaactaaaagaagaatgggatctcgtgcggccaataatttgttgagaccttggttgattgaattaacaactcctcgacatggttctcggccttttgaaatctgccatattgaccacacacctctagatgttgaatgtttatgtccttatagtaacaagaatttaggcagaccttgggtaacagggatgattgatgcctatactagaagaattttagccttatatctcacctttgatgagccaagttatcgctcttgtatgatggtgatgcggatttgtgtgcaacggtttggacgatttcctgaattaattgtagtagataacggaaaagaatttagttctacttattttgaaacattactcgctcgttttgaagcaaccaaaaaacatcggcctaaagatgtgccgaaatttagttcaattattgagcgttggtttgggtcacagaatcgagaatttattaataacttgagaggaaatacccaaattatgaagcacgttcgcctcgtcaaaaaggagaataatccgaaaaatttggcaacatggacattagatgaactctatgattatttagcctttggttatgcttatggggtttatgataggatgcaacaccctgctttagaaggaatgtctcctcaacaagcgtatgaattaggattagcaaaaacaggacatcgaccccatcaatatattaagtatgatgagcaatttaagattttaaccttaccaaccactcagaaaggaacagcgaaagtcattccgggtacgggggttagaattaactatcaagattattggacagatgaattttatcgtgttgaaaatcaatctgttcctgtccgttatgacccccttgattatggcgtagcttatgcctatattaacaatcattgggtgaagtgtttatctaattatcatctcagatttcaaggttattcagaaaaagctgtagccattgcgacaacgatttgccgacaaaagcgaaaacagtccaatcaaagtctatatgtcggcgcaaatgagcttgttagtttactcaaaaatgcggaagactatgaagaattaatgttacaaattcgcaaagatcaatcagcaaaattagtctataatttaatagaaggaaatttaagcagtgcggttttaaatccagccgatattgagcatccttttttacaggatgatagcaaagttgataacaatttttctaatttagacgaagatattttacaacccagtttatcaacaacaactcaatcagataacgaggatgacgacatcggattttatagcaatgaggaattatggtaatgactgaaaaacgccttttttcttgggaattgttagaagactcaacggaaaacaaattaaaatattttaaagatgtgattattcctcatcgaaatattaaaactattttagagcagttactaaaaaatgcgattgaacctgatgatgcgttagtttatctggtttttggggtaacaggggttggtaaatctcgacttaaagcagaatttgagaagcgattattgagacactttgaagctgaaatcattgcgaatccaggtagtttggtagttgggggaattgaggtagatggtgcagaaggaggtaagtttaattattccgattattatatccaagttttagaatctttacaagaagttttgattgactataaagaaaattatgagattgatgaagacgataatgaagataatttacgaggagatcatgaagggaaaaattctaaagcattacgtcgaacaatgcaaaaagtttttacccaccgtcagttaaaagcttatactttagatgaagcacagcatttatttgatgtagcaggaggaagacaaatcaatgttcagatgaattggcttaaatctattgccaataaaactcaaacggttcatgttttatttggaacttatgaccttttgaagtgtcaagaagtgaatggacaagtagggagaagaagcgaagattattatctacctccctattatttggataattctgatgaccaaaaagaatttaaaaaagcaattaatactttacaacgacattttcctgttgaaaatgaacccgaattaaatgaaaagtgggaatattttatggaatattccataggatgtatcggtattcttaaaagttggtggtatcgtgcgctcaaaaatgccttggatgatggtgcaaaaacggtcagaatcaaggattttcaagcaagggaattatcttctggaagacgaaaaacgattaaaaaagagttagaagacggagaaagacgtttagctgccttatattttgaagagaaagccaaaaagcctaaatctgagtctcaagcttcatcaaaatcaagcacaagaaaagtgggagaacgtaaagcgattagggacttagtaggggttaatcaagagggatgagcatctatgaggagttttggagttctaaacccctaaaacttcccccaaggagtcggttattctgtcttaaacctatgggagttggaacttgctatacggaaagtctcagtagttatgtgaatcgtttagcacaggagcattgtttaacatcgcagaagttaataatggcagaaattgcgccacttattctaaaaaatgaggataaatcggatttattaaagaaaagtgttagtcatttattgggtaatacggatgccaaaccagtgattaatggaatgcgtgagatgacgggggaattagttagggtgttagaacagttaacgatgcgtcaggatttacggtttttgacgcttttaagctggaaaggaatgatttatgaccgccagttatttaaaaattatcgtgcgtggtgtccttgttgtttggaggagtggaaaggggagaaaaaggtcatctatgagccgttattatggtcatttaaggatgtagaagtgtgtttacttcataaacagcgattaattgaggaatgtcctcactgtaacgctcgtttacctgtatttgcaaggttatcccctgtggggttttgttctcgttgtcggggatggttaggggataagaaagaagagatggaagaggtggaaccccatcgagtaaatattgagggaattggagatttaattgcggtaacgccgaaaatggcttacaaaccgattccgattgagttaacccgtaagttagaggtgattttattggcgtttgaggaagcctgtgggaaggatatcacgttattgggggatttaggggtaattatggagcaaatgaggatagcaacgaaacagcatcaaaacaagccttaccatctggttaaattggttattcctgtttgtgagaaggcaaatattcgggtatctgagttattattattgaattttaaggcgttaagcgatagggtgtttgaaaatttggagttagggatgaggctttaaaaatgtagtattaatgatcaatgataaaagcttaaagacaattatctatcatattcctgtgtggcttgattaagttcatcaaccatataccgatacaaattatctatgacatcaaggcaactagattgtaatttagaatcacgggtttgactgtaaatttgtataataatttggctaacatactgtagttgattagaatatccaccatttctattaggactttctaatagaaagacattaacaaaacgttgacagactttaaaagcgagttgtttatcgaatttatcaatagttgtaaataagtgaagtaaatgaaaacttttcttgacaaagacagaactattaataaaagcctctatcattttaggatagttggttaagtcttggggttctaaatttgagaaaaatcctgcggcttgttcttggacttcttgattagtatcattaaatagttgtatcaatttctgttcacaaaattctctatggtcagcttgacgtaaattattaatataaataaaggcggcagcttttcgatgagcaggtgtacttaattttcctgataagtaattttcagctaacaattgagcttcagaattaatgagtgatactaaaaataagcttcttgctcctacttcttggacttctggaatttgcgagtttatcattctttctactataggttttaagtctgtataatgtgttcctaaagcatagtaaagaaaacgatttattgtttgagtgcttagtaatatatcttctgtatcaactaattccttaaacaaattaattgctaaatctctatcataatttaaaaccgcgattaaagcatgagcaacacaagacctcacagcaagaaagggatcttttaccatttgttgtaaagcttctttaaaataaactgtacgttctttgtctttaaaaattagatgagcaatggcttctaccgctctccctcgaactgaattaattcctttaatataaatatcgttagctaatgattgatctccattaatcacttgaaaaggttgccattctttgtcagggtttggatcatgtaacgcataataagtaatgatatcaaatcctatttcatcccaaggtagataagctaattttgtgactgtctgactaatttcacgaccacaaggtttgtgtggtaattggtggcaacgttgacagacatttaatactgtttccatctctatttcaacttcagtttcagcaattcctcttaaaatagcattaaagtaataaagattagtattatcaggaaattgatctattagttttgcaaagcgataaggatctttttttacttctttttcaagattatcagataattcataggcttcaccaattaaatctcccattttattttcatgttcacaatcgtatgttttaatagcctctaaccattgctcatcagtcattttttcagtagcattttttggaattggagaactgacaacgcttgctatctctcctatcggtgtaggtttgatgctttcagatgctttaatccatcctaaagacataaacttacgctgtaactcaaaaaatcgttgtgttagtctttgactaggaataaagaatttcgtatttaagaaaagtaatcgagaaaaactaaagatattctgtattaaattaaacttgatgagaacaagctttacaaattgttcaattaaaatatcattgataccgtctagtataataaactgaggatattctcgttttcttctcagccagttacgagaaatatataataattcttttaattctttatagtaatcatatattgccaaataaacaatgatttcaggatagtgacttattaactgcacatctaaaaatttagcgtgtttatagtttagattaattattatttgaggatgatatttaggccaatcgttattaaaagagccataagttaatattaattgttcaagcttatcaagatgattttgtgaacagtaaggtaaaatcgctttaattaattgacgactcgcccaaaatctagcagataaagaattatcgctaactcctgaataacctgtttctaagcgatagggtttatcgcataaatattctactatttcatcaacaaatttaaaaccatttgctgtataagctcgtattagtaaaaattgaatggtttccgaacctgatgataataaattatatttgtcaataatttgagtaaattcttcaggattatttctcgctaaattcgataaggcgatttccattcctttgaagatagcactttctattccatgacctccaccataacttctataataccatacgttatcttcatagggtttttcatcatctttgatagatgtcaattctatgacagatagcataaatggtaaaacattaattacataatcttttggagctttatcagcactttttagaaaaatttcagtatgctgtgtgtctggaattgttgccttatcttgctttaaattataactataggtatcaaaaggatttaaccttattgttagttgtgtatattgctttagaaaagaaggatgaatatttagacaacattgataaatccagtgtaataaccaaatttgcattaaatataattctaatcttcgattaagataatgaccaataatttcacaagtccatgcagagtttttttcagatatagagaaaataagtgtccaaaaatcaccattcatggctaaagtatctcttaaattatctaatttttctttattgagcaaggttaaaaataaatctaataattttctgctcttgtctagttcaaaagagattctatctgctatatatagaaatctatccaaccatttttctgatgagttttcaataaatggttcaattaaaggtgaaacttcatcgggtaattgactcgctgtcgaactgattaggcgtaccgtcttatcaactatcaaatcattatcatctcgtaaccattgttcaataatacctaaatctttagctaacataaaccattgtggctgatataatattccccaagcatgattaaataaagatgactcgttatctgtcagaaataggtgaataatttcccattcttcttctgcggggttctctaaatttgacagtaaactaattaccaattgtttgagatgaaagcgaatgcgaatatcttcactatttaataattgctttctatcatcttcactcgttaatagcttactatttaataattcttctatgtcataaagatattgattaaaattgattgatctttcaaattgcaaaatttgtcgaacttgagcgcgtttaaataaatgttgttcgtcttctcgtaaaaatgataataattgtttttctctagcagtaaatcttcttgcaaaagcataatcaaagaaattttcatgaaaaaatttaattttatcttgctcttgaataagaacattttctgaaatcattattcttgtatcaattaaataatcatcaagaagatacttactaattgataaagtttgattgagttttgtgctgatattatcgcagattttatctattacttcattccattgaactaaatgcttagttttctcatctccataaagtttagtttgcttaaattcccagaacttatcaaataaatcatttgcagtttcaaaatttaagttgttaattgttgaatcctgagatatttgtgctaaaagtcctaaatgtaaaggtaaagataataaatcaacttgcttctgatttaatttacttgcatcaagtcctaaattttgaactgtttgtttaacttgttccgatgataatctctggatttcaactgtttctaaaattccttgcttccctattaaatttttaatccgagagtcattatctaaatcaaatttacgacaagcaactaatacacgcaccttagaaaattgttttgtttgttcaagaagactatgaatacaatcaaaaaactgcggatttcttcctgatacttgactgactgcatctaattgatcaataatcaagactgtttgtttttgggaatacttactaatatttgccagtatgattgtaggagaaagaggtaatctgtattttctgccaacatcatcaggattaacttctgggggtaaattatctatccgaaatacaaaaaaagtaatgttctcttgctctaattttttagcaatttgtaacataactccacttttaccaactcctgcttctcccattagaaatactccttttttattttgagtattaaccagtaagttgaacgcttcttctgcttcttgccttggaatagattgtccagcaattactgtttgtttttctaaaggagataaatataattgattcgctttatctattgctgctaagacatgataatttttactataattacagcgttgataacctcttgtgtctaaatgtttccaaatatcactagctgttaggattttatgaatactgtctaaagcgaatcctgctaaaatatcaacggccgtttgatagtcagtatgagaaggaaaatcattacttttagattcaattaaccgtttgatattatccacaactgtttgacgtagttttctctcactaattgtttctacatatattctttttaatttctcataagaattttcagctacatttataatagcttgctgttgatgacttaattttccacttttaaaatcctcaatcgcttgttcgatttctagttgttgatacttataccaatatttcactaaatcatgaaagctttctcgccaatcttttgcatctaaaaattctctaacaaattctatccaagattgtgaacttcttgctctttctgctagttcctcaagttgataagcgttattaatcgaaataaaataacaatgggtttgattattctcaagttttttcttaaaattggtcaaaatttgtttagtttctaagtcagctaatgtccaacgtccctttgtattttgtcgcttgacttgatgatattctcgaatatcttctctctgaagccaaaactcaactccttctccttcttctcccacaggttctaagcgtatagtagtcgcttgttcatttaagtgatttaaactaatgaactctatctcaatattgtttgctttttcgtcaattaagtctaacaagcagtctattgtccatagaccttcgtaacgatttccaattttatcagttgcgccacccgataaaggcatgatgaattaagatactcgttgaagattttgcttaaaagttttgtaatagttaatagcgatggtgaaatataataatatactccaataaatgcagtttgattaaattaatacacctaacggcataaagccacgaatcacgtcagttaattgggacgaaaatccctggatattttccttgagcaacgcctaacggcatgaagccatgaatcacatcgttgagcctctttaacacttagcccgattttttaaggattgagcaacgcctaacggcatgaagccatgaatcacagcgaaggtgaaaaccctttactgatgaaggcctattttaaagtttacaagaaatccgattgtagagtttaaaactacatgaaactgagccaattttctgattccttcaactgctaaaacccagtccctgtaaacttttcaaagctttgcaagcacctattaaccagctaaaatcgtcctatcccttatcccatcagcattgtggtcaattttctcccttcaatctccttctcgattatgaggtacttgtcaaaccgatgattgaattgaagtccatgcgaaatcaggaggagataactgattcatttcttctacccgataccgcaaaaaacgggtatttcttgaccccagatggtcaacccaatagggtaacgttaacctacctccattatcccttattaaccatcgtctgaccccctcccgataatcctcagaaactaaccgtatcgtcttaattaactggtcactttcccctaaaaataaacacccaaaccgtcttactaactcaggacgctcaaaagtaaactctatcctctcctttaagcttggttgcatcatctcagcctcagaacgaacccaaattaagcacttcaaattcgacaaaatctcctgatagctaggattcacattctctgcatgactaaaatccttctgcttaaaccgtctcatttgacgcaaaatccgcgatttttttgcttcagataacatggcaattgccaattctaccccacaatgacgataaacatccgtttcccccaccaaagacaataacatcccatataccgtcgctggaggaggaacaggataagtccttcccatctcccttgcatgaaactccctaaacgtcacaaaaggaacatctagatagataactaaaggtgtattcattgtgagtcttttaaccccaaatcttgtttaatcacttcctttaaatcggctaccaactcattacgatttcgataaagatgtatctgttttagtaaggatttctcaaaattttctagttctcgtaaatcattaacaattgcccctccaatccataactcatcaggattaatctgtccgcattccacctcattgataaaatcttgagtcaatttaatatttctccctttcccatcaacggattcaaaacaataggaaatataagacgcaaaatgatttgtccattgaaaaactaaactatcaggacaaaaaggataactgaaaatattagcacttcctcccactttcggcatatccataatcccatcaattaatggaaaaatccgagaacaatctttaagatgagtagcattaagcccaaaataatattgataacgagtattatgatattccgtaaaatgaagcgatgtgctatccttatccctaccactttttgcccctaacttcaaagaaccgtcatagggagttaaagaaatagcattattcatacttaatgcccctgttctctgagcagtcgtccctgatttctttcgttttcctcgtcttcgagttgatggttgtgttttatcttctaccgtttcttcttctacagattccaataacgcaaagccaaaaatatcatcatcataaaattgatctgggttaaaattatcatccgttaatcgattaatatgttcatctttatcccatactctgttaacaggataaccttcttcttgaagataaaaccgtaacgcccaccgtagagaacttgaccccactaaagaatgaattttgccatcccaataggctttttgtaaaatggatttattaccttgtcgcatcccgtgacttaaagaggctaagccatagcgagtcaaaactgttccataaagataataatttggtattttattcttcttctgattcatctttaattccttctaattcttgcaaatttttgggtttaggttcgtaactagcaatccctaataatgcccaaattcttaatttttcccaaggcacttgttgaatcaataataaaacctctcttttctgaccttgtaatggtttatttaatccgcctcttgctaaaaaatcagctaaatagtgctgaaatgatatctcatcatagcaacaatttaactctgcccgtaatcgttctgctttcttctgaaagagagggttttttcctctctcagtttttgcatagattttggcaaaatttgccctcatcgcttgctgaaatacctcaataaaagcgagatatttttcatctcgttcactattttttgtcatgaatttaacccctttttgattagataataactgtttaaataaatagtttttagaatcttcatcaatcaatttcttccaaaaattaaaccaccaaggctgtttttgccttaaattttctgcaattagtgaccgaaccagatttacctcaatcagaatattattagggtaaatatgttgataattgggttgaaagtattgtttaacttgttgataggtagtaatcatttccttatcaatttcaatctcttcaaccatcgtcaacactcgttgataagatgctttattcattttctcatacaaccaaacttgacaagcttgactataattttcatttgcttgaatttcatccaaactataataaagcagtcccgcttcgctcatattagtaacatgaagttgttgaggttctaattgctgtaatcgccatcttcttcgagaagcatcttcaaaattattaatttctggaatcacaacaagataacgatgaggtttccttgaatttacatcctcagacggaaggtgaaaaagacaataatgacaaacaacaggaacaaataacaaggctaaagcatattcaggcttttcttctagtttagtctttttgtctgctctcgcatgacggacaattccccctaaatacaaccaactggtaatttgaagataatcctgttttaattgttgagtatctgtgtcgcataattctttagcaaaggtttgatgtgcataccatattagaggtttgtaggaataggaaacttcacgttcttcaacggtgaaagagatttttttagcttctcctgcttgataaaatttattatgacggagaaaaactgcttttattgcttcattaagctcaattttttgtctcaactctgaataatcatctaatcctgtcaaacaaatcaacccattatcatccagttgaaaagattccttcagcaaccaatccaacgcactaaaatcaattgcttcccaaaataaatcaatagtatcaggggttaatgaccatgataaatttccctcacgctgacgaaaatcaggatatttttcttctaatcgctttaaagttaggtaaagtccggccattcctgcacggtgcatgatggtagtatcacaagcagtcaaagataaggaaattttgctttgagttgcaaccgtcatggggttttcctctcatctttaggacgagtcgccggaacaaatatcccacacatcattttccgttttcccccgattccttgttcttgcaaggttaaagagtcctctggactcagttcgcttatcttaacgccaaaccctcttattttaaactcattgccttgcttacgaatggtcaattgtcgtcgttgcggtgttccattctgtcgagtcagaagttctacattcccttgtattgctaaactatccatttgacgctgaactgcttcaagaaagctagaggagtcttgataacctttaataacgactaatcgagaataaagactatctgaggaacgtattgcttgataatcgggaatattcagttgataagattcttgtccaatttcaaaagtttgacctgttaggtaaggataaattataggaatttgtaaatgatgaatgcgaatttttagacaagaattaggagtcagttcaagaaacttattctgagtaggaatcccagcaatgggatgaatccccacgtctttgagttcatgaagcgtcgggcaaattcgacacaaagcagaataaataacatagccattatcaagaggaatcggtgcacccctcagcttaaaaatcatatctagatgttcttcactgttaataactgtatctgtcattattgtcagcaaaaaattatttatattttttatgaattagtttaaaataaactataatagtataggataacttaatataagaatttgggaaaactcttgatgtaaattttaagaaagattttatcaaaaaaattgtagatgaattaatctccgatggacatagacataaacaaaattcaaccctataccaacgatgagctatggagtccagagaaatttcccatgcctcctcgaagtcgtttgcatcatttacaaccgatggggataggaaccccaatggttgagagtttaaccagttatgtgactcgtttggctcattctcatggggttcatgtgggaactctaatttataaagaaatcatcccttgtatttccaaaacatataaaaccaccaatttactttgcttacgcaatcaaacaggagcaatcaatggttgtggtcttcttgccgaagattcggttcaagctttatcagaactcaccctatatcaaaatttatctaatttaactatgttgaattggaaaaacatttttccaaacagaaaattaatccgaaaccataaggcatggtgtccattttgttatcaagaatggcgaactaataatcaaattatatttgaccctttaatttggcaaattgaagtaattcgattatgttcaattcatcaatattctttacaaacactttgtccttcttgtaaaaagtctgtatcagtgttatcacctaagaatcaattgggttattgttctaattgttctaattggcttggaaacattgaagattatcttaatacttctttatcaattcataccaaatttaaagataaaagctattttttatggattgcggattgtttgggaaacttattatcttttccttcaactattaaatctccctcaaaaaaacagatttctcaaattattcaagctattatccaccaatcaacaaaaggtaacattgcagaatttgctagatgggctaatatgccgaaaaatacggtatggatgtgggttaaaggtaaaagcttacctcaacttagtcgcttgttagcactatgctatttgtgtcgcgttgatttactagattcaataatcaacgagggaaatatcacaaacatgattcttcatcaaaagagtattccttcttctgtaaatgaacgcccgaaaatcttcaagaacactttaaaccatgcgcaaattcatgctgctctctcagaagctttccaagaaacccatcctcgcccaatgactcaagttgctaaacgattaggaatcagcaataaagtgctgcgaagacactttcctgagctttgtaagaaaatttctcaacgttacctcatttacaaaaaacaatctcgcttggaacgtattcagaaagtttgtatagaagtagaaaaagcagttaaacaacttcaacaacaaggtatttaccctagcgaacaacgagttgcattacatatcggtcagcccggttgtttccgagataaagaagtcagagaagtcctaaaccgaactcgacgtaattggagattgttagatacctgacaagactatttgacttaaaatttttcaggcatagctttgctgtcagattttcaggcataaccttgccgatgcggcaaaaacaaactttaaataatagaaagtctcgcagcatctcttaaaatggtaatgggggcggagagacttgaactctcacgaccttgcggtcaacggattttcattctcttgcagctttcgctactgctttacctcagct

SEQ ID NO: 900 - DNA, 32767 bp, Nostoc sp.
  source 1..32767: mol_type = other DNA; note = NIES-2111
aaagggttcacggatggaatttactaacgacctatcttagtgaaggtgatgttttatatttaacaatgccagcaaatcagttatataaattgtggcgtgatgaacgggcttgtggagttggagattaggaattatattaacttccatctcacaaaaattgacgatctaatattagcaatttgaatcgaaagcataagctttatgctttcaacaatgcgacaacaactataagttgtcctaaatgacaaccaatagttgaccaagatatgctttcaaagcctcattctttcgtgagggcgatcatagcaaaaaaactattgacaagcattaattgacctaatgtgaaaatactaggcattagttgaccaaaagttataaattaaaaatccataaattcacatttaattaactgtgtgatgtaaacatagctttgcatctgaataagccagatgctaattctctcgtgagtgcgatcgctcctaaaataaaactgcaaaattatatgcttgcggaaattgggcttgatgcgatggtctgctggtcgcgctgtagcttctctgataggctgaaaaaagacctgcaagaagctcgcgctggcaaattattatgccgtccaacatcgcagtagaaatattaattaagtttcaaggtagcaaaatagacacagttccacaggaaaacacttatttattgatatagtgaaatgtaatttgcacaaggttttgagagaacactaataaagagacaaaaccctaacccttctaagttactgttctaggatgctgtaatgtctttgagtgaagtgaataccagagaaaagttaattgatccggcgttagaaaaagcaggatggaatctgacaaatcccgatcaggttataatatatccctaaccagtgagaacactgcaaacaatgacctaagctgggttctcagtctaaccaaagtagttggcaatgacaatgaggacaattttgcacaagagaatattgatgtattaaacaaactctggcatctttaaacttttctggcaatttccatctatgacagccatattacttcaaagtgaggaatatgtagacttaacgtttaagctaagaggcgcactgattcctcttgataacggttatgttatctatagtgctttgtccagaatttgtcctatcctgcatgaactaaagtcgattgggattcatccaattgctggaataccaaccaagaacaatttacttgaactcaccactcaatctcgtctaaaaattcggatttatcatcaacacattcctttaatttatccttatttagcgggtcaagcttttcatataggtcaaaatttttatcagctagatattcccgactacaaaccgttgatttcttcagaaagtgtctattccagattagtgataattaaaggatttcaagacgctactaactttattgaagctgtgcaacggcaactggataatttaggaatacaagggaaaattgaactacttacccgacaagatggaacacctcaaaaaagacaattaacaatcaataaagaagggaaacagtttaaaattagaggatttggcgtaaaaatcagcgaactcaacccagaagattccttaactttacaagaacagggtattggagggaaacgaaagatgatgtgtggaatatttgtcccagcgactcgcagcaaggaagaagaggaaacctgatcatggttgctacccaacccaaaatttccctatctctcgatgctgcggatacgacaataatgcaccgcgccggaatgacgggactttacatgactttaaagcgattagaaaagcaatatacctcatctcgtcaacggggaggacatatatcatggtttttgactgctgataccattaagttattctgggaaggaagtgatttcgttgccctatcgtggttgattaaggagtcttttcaactagatgatacaggtttaattcatttaacagcattgtctaatgctgcaatagatttaaggcagaaaatccatattcatgagggaatatgtgctgttttcctgcgtcataatcagttttatcaagcaggaaagatagttaatgctgaactaacggttgaagaaaaaaaagtcgagtatcgatacaaatccctaacttggtatgcacatcaaacctttgcagaaaagttatgcgaggcagatacccaacaactcagagaagattatgttcaaatgacgagttggttgtatttaggaggaattgttcgccatgctaggacacagaacactacaaaactggaagaaaaacctgaatacgccttagcattattatttgtaccagtagtttgtcattattgcttacttcatattccatcagaagacttgaaggaaaagaaaccccatcgctatggggtggtaattccggaaatcaatgattttgaagatgcttctcaaagaagatggcgattacagcaattagaaaccaaacagcttaatgttagtagccttggtgaagcaggattactttattacagcttagacgatattcagcctgaaggcggctactatcaagcttgtcaagtttggttatatgaaaaaatgaataaagattctcgtcaaagaacattgatgagtatagaagaaattgaagttgataagaatactttaatcacttatcaacaggtgcaaaaatatttttaaactaattatcagcaaattaaacctaagcaaatttttattaaagtgaatccgattcgctccataattgctgataatttagtaaaaggaatccattggtggtctgatttttgggaaaaattggtgatagaggattcaaacgaatatttatttaaccagttatttttcaatcgagaaggattcataataatggcagagaatagtgaagaagacaagcattatcttattttccttaaggtgtttcagcaagctatgaagggtaactttgctaaaatgtatgccaaggcagaggcagggaaagaccctccaattaagaagaaagttgaacgattaagagcagagctaaactattgttatgatgaattgtcgtttaaagaatatttgtctgactttttagtaagagggggattaaataagtatttcaatcagcatcaagaagagatagcactactaattaaaaaaataccttggcaagaattaagaatttggtcattgttagcgatcgccagttataaacctaaagataaacctatcgaaatgaatgatgagtcagaagaagaatgacaataatatccctaattattatctttacggaacagtcctcactcgttatggtttagcgtcattaaatcatgacatgagacgaggaaataagactactctgcaaaaaggctattggaatggtaaaattcattcttttgtaggtgcaaacgcaattcgttgggcgttacgtttttatcttcaaaagcaaggttacttagttaatcgagtttgggatgaggatgaacatattaatcggttaacaagtgaagatttcgacccagaagaattttatgatgatgatatttttgggtttgctttattagagtctgcggaaacagaggaggagacttcaacaacaaagaaaaaaaagaaacaaaaaacagtcagcagtcctaatcagcgaattggtgctttagcaatgaatatggctgtgtccctaacgccttatgatggtgcagtcaagttaggagcaaaaagtggcagagataaagatagcacatcgctccactttacagagtatcatgcaactcgatatcaatattattttggaatcaatcccactcatctcaaagagatgtcgcggattttacctctgatagatgggattatggatatgcccaaggtaggagggagtagtaatatttttaattattctttctgtccagatagtttggtatttcaatggacaaatcattttgcttcatatatttcctattgctttgaatattgcgatcctaagactaaggaagcaaaacttgcacaagagtttatagatgaagtggaatgcggacagattgaccctagtacattatggattgggggaacaattgttaaggagttaaagcaattggataattttgataattccccttttaatagagcgcacatttatcgtaatcgcaatgaactggttgaagctttgaaagcagttattaaaagagatttgggtttacaagaatcaaaatgattgcaccattaattctctatttagatgttccatttgcgacttttagggagtcccatgcaagggaaatggggaaaacttatcctgtacctcctccagcgacagtgtatgggatgttgttgtctttggtaggggaaacggatgtctatcgtcactgtggggtagaattggcgattgcgatgttatctagccccaaaaagtcccgaattttacgtcaaatgagacggtttaagaatgctgattttagccacccagagaatgttattccctgttatcaagaaattttgtctaatgtgaagtgtttgatctgggttcgttctgacggggagaagatagaactaagtttaagggagaggatactgttagcgtttgaccatcctgagctagtaagacggtttggttgtttatttttgggagaaagtgaccagttaattaaaacaatcaaacttgtctcacaagattatccagagggggtgagacagtgggcgattagggataatcgaggcaggttaactttaccctattgggttgaccatgtggggtcaagaaataccagatttttgaggtatcggattgaggaaatgccaagctcactaccccctgatttggcgtggacgatgattacatctccaatttgacaagtatctcttatggtaaagggaatataggctaaaagaatggcaggaaggtttacacggtaagggttatgataatttaggacaggaaaaaggtgcttgccatttttgggaaagtttatcggcactggttttgaggggctgaaagtaagggaaaccttggtaagttttgtgtttttggtttctcgatttggaaggtgcttgtaagattgtaaatgaagcttcctgtgttaagggttttcacctttgctgtgattcgtggcttgatgctgttaggcgttgctcaagagaaaattgcgatgtttgaagccaacttggcttttaggtgattcgtggcttgatgccgttaggcgttgctcaaagcgatcgcccactggtttaagatggagtgcgatcgctacttacgctcctataccagagaggatttctattaggagagtaggaaaaactattgctttacttggattacttgaaaaacatctttgaaatccagtaattgaaactgcataagatttttagatgtggcgaattaagtgagcaacagagttgcttgatgaatgtgctgaagaagttatagccaaaatgcacatacacgttcctatatttgtttaaattaatgtagattctgcacacgtataagcaaagctcaagataatgcgaaatatagttcagatgtgatatatttctctgccagatgccgcttatgaaaattttgttggttgaagatgacagattaataagtacggcactggttgatttgctcttagcaaatcattacactattgacttagctaatgatggggaaacgggcttatgtctggcgatttcggcagaatatgatttaattttgctggattggctccttcccaaattggatggtatgagtttatgccgtcaactgcgatcgcaaggctatgtcaagccaatcttgctattaactgcaaacaattgtaatgcaaagcttgtcgaaggattagatgcaggagcagatgattacgtcataaaaccttatgacccggaagcattgctggcgaagattcggtctttattacgtcgtcatgggtcagtagcatcatccacattaatttggggaaatcttactttagaccaaatctccggtaaagtcacttgtaacgagcaaataatttcactcacggctacagaatacaaactcctagaattgtttttacaaaatcccaatcgtatattcagccgcaagttaattatagataagctttgggaatttgatgatgcaccgattgaaaatgcggtaacaactcatattaaagatttacgtaagaaactaaaagcagggggtcttgctggagatatcctagaaactgtctacggaatgggttatcgcttaaatcccgctccagacgactccaaaaatgtagcaacatcacagccacacaattgggagcaaaaaccccgcacaaaagatttaacttctgttaatcgagtattagaacgatttcgtaactcatttagtcaacaagtcactgtattagaacaagcaaaaactgcactgttggctgggagtttaccaccacagctacaccagcaagcactgcaagaagctcataagttggcaggttcaatgggaagttttggatatccacaaggttctacactggcacgaaaagtagaacacttgttacaaaataatcacaccttaacagatgatgaaattacacagtttgaccaactggtaacagcattacaacaggagttggcaaagccaccaaccacaactgctcaacctgcttctttgcagcaaacttaccgcgtactggtgattgatgatgatactctgctgacagagcagttgttaacccaggcagatgcttggggaatgcgaataaaaattgctcctgatttggcaactgcgcgatcacgcctagctttagccactcctgacgcagttttgctagatttgagcttccctagcactcaagaagatggattaatgctgctacgggaattgggagaaaatcacccgaagttaccaattattgtttttactgcacgggatagcctagctgatagattagcggtgtcacgcttaggcgcacggcaatttttacataaaccatcgacaactaagcaaatctttgaggcgatcgcgcgtgtgctacctcaagccaaaccatcagaagccaaagtattaattgtagatgatgacccggtaatgttagctggattatcgcaattattaaccccttggggattagaggtcattactttatctcaacctcagcaattttgggaaatattagtgaatacatcaccaaatttagtgttgttagatttagagatgcctgtagttaatgggttagagttgtgtcaagttgtgcgtcaagatgctcactggggagatttgcccatcttggtggtaacagcccatactgatgctcaatcactacaacaagcttttgcggcaggagctgatgattttattaataagccagtgctaggcccagaattggtgacacgggtactgagccgtattgaaagaacgcgacggaagggataaaggggtaaggggtaaggggtaaggggtaaaggggggaagatgaaagtttatcggcaattattagcttatggtggtgctattggctcaactgcgatcgctttggtattatcgctttggttagaaactctaatatatagaactgttggcgcttttttctatatagctatcattttcaacacttggtatggtggtttgcgtccagggatagtgacaattattctttcgacactggcaattgattatttcttaattacgcctcagtatcaatttatcccctcagatccacaggatatattgcggttaggtctttttgggttagttgggttgataatcaatcagctaactggcaatttttctaaaagtaaccagaaaattcaacaattaaaccaaaaattggcccaagaaaatgccgagcaactgaggatggctctatcagcagcacaaatgggaatgtgggactgggatatggtaagtggacaaatcaactggtcgccagaacacgaacggttatttggtttggcttttggtagcttcgatgggagatatgaaacttttgatcagtgtctgcatcctgaagatcgtcctctgctcaatcaagcattacaacaggcactgcaaactcatagtatttatcagtgtgaatatcggatagtttgggcagatggtagcattcactggattgaggcacgaggacaagcattctataacaaagcaggtgagcctgtccgcatgagtggaactgtgatggcgattgatgaacgcaagcaggcgcaagacttactgcaacagcaatttgagcaacaacgcctagtgatggagatgtcccagcgtattaggcgatcgctgaatctacaagacattttacaaactactgttgatgaagtacggcagtttttggggtgcgatcgcgttattctgttccagtttgcacctgattggagtggcactgtagttgtggaatctgtcgatcctcattggacagcgatattatctaccgatatctacgatccttgctttggggaaacatacattcaaccttttaaacaaggtctagttactgcaaaatctgatatttatactgctggtatcggctcttgccatatcgaactgttggctaaataccaagtgagggctaatttagttgtgccaattctctacagagatgaattatggggattactcattgcccatcactgtgcggctccccgtgaatggcaatcaagggaaatagctctgttgcagcagttaggagaacaggtaagcattgctatccagcaagcagctttgtttgaacagttacagacccaattaagggagcgtcaacaagcagaacaaagtttacaagaaagagaaataaccttacgcttatttgtccagtatgcacctgctgggattgcgatgtttgatcgggatatgcgttatttaatagccagccaaagatgggtggacgactatcgtcttgattcagtggcgtctgttatagggcgatcgcactacgaactgtttcccgaaattacagagcgatggcgacaaattcatcaacgctgtttggctggggcaattgaaagatgtaatgaagatttgtttatgcgtccagatggcagccaacagtggatacgctgggaaactcatccttggtatactactactggtgagattggtggcattattatttttgctgaggatattacagagcgcaaacaggcgcaaatttccctgcaacaactgaatgttgaacttgagcaacggatagccgaacgcacagcacaactgactcaaacaaatgatcgcttgatagaaacggtaatccagcagcaacaaacccaacttatacttttagaacaagcacaattactggatttagcacacgatagcatcattacccgtgacttaaacggggcgatcgccttctggaacgaaggagccgaatatatgtacggctggacgaaagccgaagcattggggcaaataacgcatactctcctcaaaactcggtttcctcaaccattaactcagattgaggcagaactctgggaaacgggctactgggaaggagaactgattcatgtaaggagagacgctcgaccgattactgtagccagtcgttgggtgttacaaaaagacaacgctggtagaccaataaagatcctcgaaatcaataatgacattactgagcgtaaacaagcagaagcagctttacagcagtatgtacatgaaattgaggatttgtacaataatgcaccctgtggttatcactctctagatgctcaagggaattgcattcggattaatgatacagaactgaagtggctaggatatagccgcgatgaaatgttacacaaaaattttttagatattgccacttctgagggtaaaaaaatatttcaagaaaacttttttaactttaagcagcagagttcgattaataatttagagtttgagattctgaacaaagatggcacaacccgatgggtaagtgtgaatgccacagcaattaaagatgaaaatggcaactttgtcatgagccgttcaagtatgtttgatattagcgaaaagcacgctgcgctccgcgaacgtaaacgtaccgaagcaattctgcgccaatatgagggcattgtatctagtaccaaagatggcattgcactattaaatcataattacatttatcaaatcgttaatcaagcttacctagactggtgcaacaaacccgatactgaagttttaagttattcggtaagggatgttttgggtgaaattttatttgataacttcattcaggctcggttagatagatgtctaactggagaaacaattcagtatgaaagatggtttgattacccgaatttagtaccgcaatttatgagcgttacttatacaccttacctcgaaccagaaggcagcatttcgggtattatcgttagcctgcgggatttgacagaacttaaacaggcagaacaaatgctagaacttcaggctgtcattacccgaaacatggcagaaggagtctgcgtggtaagtgctactgatggcagtattgtctatgctaaccctaaatttgagcagatgtttggctatgacttgggtgaactaaatgggcaacacgtttctatcgtcaactatgccacccaatcagtaactgctgaagatgtcaatcaagctattcgctctgctgttttacaaaaaggtgaatccacctacgaagttcataatgtcaaaaaagatgggacttcattttggtgtagtgcgacttgttctgtctttaaccatcccgactacggtgatgttttagtagcagttcagcaagatatcacagatcgtaaacgtattgcagataatttacgtgaaagcgaagaaaagtttcgccaactggcagacaacattcaagcagtattttggatgacagatattcaaaatcagcaagttctctatgtaagcaaagcttatgagactgtctggcaaaaaagtagtgaaaatatctaccagaatttttcagattggttagattccattcacccagatgatcgccagcttctcgatattgcatttactcaacaatcacaaacaggtcaatctgataccaaatatcgcatcatccgccctgatggttcaatgcggtggattcgcgatcgcgcctttcccatcaaaaatgaaatgggggaaatagtgaggatagcgggtattgcagaagatattacagagcaacaaaaaattgagcaaattaaaactgagtttattagtatagtcagtcacgaactgcgtaccccattaactgcaattagggcatcactcggcttattaaatagcggtatctacgataaaaaaccagataaatttaagcgcatgattgagattgctgccattgatagcgatcgcctggtacgtttagttaacgatattcttgatttggaacgcttagaatcaggtcgtgctgttttagacaaaaccacctgcaaagcagccgatttaattacacaagcagtagaaggagtaaatgcgatcgccaagcagcaaaatattacctttaatattcaccctactaacgctcaggtttgggtggctgctgatacaattattcaaacgcttaccaacctgttaggcaatgcgattaaattctccccccctgactctactattactttaattgctcaacagcagacagattatgtactgtttcaagtcacagatcaaggtcgaggtattcctactgataagttagaagctatctttggtagatttcagcaagtagatgccacagattctcgtgtcaaaggaggcacaggcttgggattagcaatctgccgtactattattgagcaacacggtgggcaaatctgggcagagagtaaaattgatgttggtagtacgtttttctttactctgccaaatactaaggaataggacgcagggtaagaataactatggactatgcgaaatgactaaaaaaatattgattgttgatgatgaagaaagaatccgcgaactggtgcaagcttgtttagaagatataggcggatgggatacaataacggctgcatcaggagttgaatgtttaacaatcgctccagcacaaattatagatgcgattttacttgatgtttctatgcctaatatggacggatttgcagtttatgagcaacttcaagcaaattctgcaaccaaatcgatacctgtaattctactgacagccaaagttttgccaagcgatcgcactcactttgctcagatgggaattgctggtttaatcaccaaaccttttgaacccactactatttccgcagaagtcgctaacattttaggatgggatgattaattttaaatttgtgtgaagaaatttatttctttattagttctttatttttttcaaatatctttcttatttacagataacaatatcgactattcccagaaagataatatatgactacttgtcaagttgaaagaattgaagaagcaataacatttaccttgttgccattccatagtagtgctttaggacgcattaaagataaacgaagcgtttcagctttgcatccacagaatgtaatgattcgtgccgttccctcccaaaagttgagacagattgtagagcatcctctgaccgaaagagaactttgtgttttgaaaatgatagttgatggcaatagtaattttgccattgctcaagatttacgtataacagtaggaactgtcaaaacgcatgtacgcaatattttatacaagcttaatgtggatgaccgtacccaggctgctgtagtagcgctacgttctgggttagtagagtaatcccaattcaaaattcagaaagacagactttattcgtattttttggagttgataatgactattgccaacgaggcaaatatcactactaaaacaatcatgctcattgatgaggaagttaatgtacgagagattgtagaactctgcctcaaagatttagcgggttggaatgtaataatagccgattctcccttaaacgggctgcggatagcagcactatatcatcccgatgcgatcatcctggatgtatcaatgcaaggtatgaatagttttaggtttatgaataaactcagaagtaatccagaaactgaagctattcctgttgtggttttgagtgctaaagcgcgatggattgattcacgaatccttcaacaatataaaattgccggagttattcttaagccttttgatccagtgaaaattactaatcaaattactgcactactaggctgggatttaataatgccagttgaaagttaatcaagcctaataatatcatttgctgcttttatattgttaattttttgataaaatttttaattaatctatcaaataattagtaatatcgtgtgcggttaaagacttatccttaaggcaacagaggggcagatgagaagggtttcgacctttttgcatagattggggaattataactaaattatccgaacatgatataacttttataaaataatttattttagtaccaattcgttttaaaaaagccacggatagctaggtagaggcgcaaagccttgtccttaaaaaataattgatgtgttgcgattatttttagaattgggataatagcgcttcttcgtgaagctgcatatatttacacccccagccacgccgttctccctgttgttgccagtagtgtagaactacaagaaaatgtatttaataaatatgtaaatttatcaattaattttgggctaaatacaataaagtcactgatgccactactatgcttttcaattgtttatcaaatgatgaaattgacttaaagcaaattctgtatcaaatcagaatgataactatgcaaattcaccactcatctcaactgagtgaaattttgaaagtaatcgtcaatgaagtcagaaaaatgttaaaaagcgatcgcgtggtgatttatcgctttctaccagatggagagggagtagtagcggaagaatctgtcaatcccaaatggatatccatccaagaacaattagtatacaatccatattttcaagctgatttgataaagcaatatcaagccggacaggttgatattattgaagatattaatgctcaaccacttgctcctatttataaacaattattaactaaattacaagttcgggctaagttagtagtaccaattgtagtcgatgatcaagcagttgatggaaattattcatcttcttctcatctgtggggtttgctgattgttcatcagtgcagcagtccgcgtcaatggtatagtttagaagttgagtttttacaactactagccgtagaaatagaaatttttatccagcaatctcaaaaatatgagaaattctggcaactccatcaaaaacgacggcacaagtttaggttagccaggataaattcccgaaaaaatattagagaaactgcatttgcaaatcaacaagaaagtatttgtcctaccctctgccatgtgccatcagctctttgtcctttagcttctaccacctgttctgtacctactgtcacctcaaataaaatagcgatcgcagatttgatggcatttgacagattacaaacgcccatctggatttatgatatagaaaattcacggatgtggtgggtgaaccaagctgcactgcatatttggaatgctcaaagtcgagaggaaatactcaagcgcaactttagcaatgtttctgagtccacccgcattcgtctacagagctatatacatcaatttcagcaaggaaaaattatcgccgaaaactggacattttatccagaaggtcaacctgtgtctgttcgctgcttgtgttctggagtgcaaatcgaagatggacgcatggcgatgttggtggaagggacaacccaagttacagaggaaattgatcaagaaatcctccgagccattgaagggttaagtcataccaccttaatgatttcgctgtatacaaccgatggtgtacctttgatgcaaaaccccgcagcttttgattgttacgaagatacgctacacccatctgctggggaaaatgcttttttgcgtcactttgttgatcccaatattggactacaagccttgagtgtaattaatttaggtgaattttttagagtggaaactcaagtcttcacaaaggcggggattcgttggcatgagatagatgtacgttgccctcaagatcccgtcacaggtaacaagatgatattggtgaacgaaaaagatattactaaggaacaaattgctctgttagagcgccaacttgcccaagaagaattgcgatggcaggaagctttgctgcgttcaatgactgatagttctttactggcgttttttgtagttgataatcgcaccgatgaaattctctactttaatcagcgcttctgtgaaatttgggatattgaacacctagaagcgaggatgcgtttaggagagttaaaaaataatgacatcattcctgactgtgtatctttgattgctggtgtcccagcatttgccgaatcttgtaagccgttacagtcccaagataatcgctgcataattgaggatgaaattttatttgttgatgggcgcacaattcgccgcttttctaaccaaattcgggatagtcgagataaatattttggcagattatacatttttgaagacatcacctcacgtaaacaaattgaggctgcactcaaagccagtgaagaaagatggcaatatgctttggaaggaaatggtgatggtgtttgggattggaatgctcaaaccaatacagtttttttctcgcgtcgttggaaacaaatgttaggttttgaggaggatgagattggcaatactctcaacgagtgggatgagcgggttcacccagatgataaagctcaagtttacgaagagattgagaagcattttcgcggtgaagcgcaacagtacataagtgaacatcgagtcctgtgtaaagatggaacttacaagtggattctagacagagggaaaatttttagtcgcggtgataatggttcgcctttacggttgctaggaactcatactgatatcaccgatcgcaagcggatggaagaagcgctacgagaaagtgaggaacgttatcattctgtaattacagcgatgactgaaggtattgtcctacagcaagctgatggatgtattaccgcttgtaatgagagcgcccaaagaattttagggttaacacctgagcagatgatgggacgaacctctattgataagcgatggcaagcgattcacgaagatggttctccttttcttggccaaacccatcctgctgttgtcaccttacaaactggacaacctcaatacaatgtcatcatgggtgttcacaaacctgatgacagtctcagttggattttgattaattctcagccattatttcaaccagatcaagcaaagccttatgcagtggtagcatcctttacggatattaccgctagtaaacaggctgggcttgccctcaaacaacaaatggaacaagaacgggtggtttatgcaatatctcaacacatccgtcaaacattagatttggacaaaatattacagactactgttacggaagtccggaattttctgcaaagcgatcgcgtcatcatctaccgctttaacccagattggagtgctgtagtaattactgagtctgtagcagaaccttggcggccgattctgaatatgaaaattacagagagtaactttattgaaactaaaggaaaattatctgggcaaagtacggtagaaattactcccaatatctataacgcaggttttgctccttaccatgtcgagttcttagaacaattgcaagttaaagccaagttagttcttcccattctacataaaagtaatctatggggtttgttggtagtacatcattgctgcgccttccgtgaatggcaaccaactgagattcaactactgcaacaaatagccacccaaacggcgatcgctattcaacaatcagaacttcatcagcgattgcaaactgctaacagagaattgaaaaatctcgcaatggttgatcaattaacagggattgccaatcgccgacggtttgatcaaaagcttgattgtgtatggcgacattttttgcgggaacaaggtagtgtttcactactgctatgcgacattgactatttcaaacgctataacgatacttatggccatgctgctggtgatgactgcttgcgtcttgttgctgcggcttttcaacaaactgtcaaacgttctactgatttacctgctcgttatggtggagaagaatttgtagttatcttacctaataccgacactgaaggtgcttggcaagtcgcccaagaaattcatcaagccgttcaacagttgaatattcctcactctgcatcagatgttaagccttatgtcaccttaagcataggtattgctactgttattcctaactctactctaacgccattaaatttaattgaagccgcagatcaagctctttatcaagctaaagcacagggacgcgatcgcgcttttattaatgaagaaggggaaaggggaaaggggaaaggggaaagggaaccccatatttgaaaataggggtttcagatatggacgctgatttttatcgcgctacgtgtctggtaaaatcttcttttaatattctccgcaattaagataagggctttataccttgtggggaaaagttttttatcctttcctttgccccttaccctttccccttttcccctttttggtaacatttctatcccaacgctagaataagcttttttattttgtactataacttaacattcctcaacttattttatttcttttccatttattacaatcttccttttctttatcagttctttattttgtttatatagattgaatacgttgaagttttaagagataagaaatttcaacgcaattaatttatttaacaaaactataatattatggcaaactgtccttgctgttctaatcaaatgcttgttcatacacgtacacaaaaaacttactggttctgccgttcttgttggcaagaaatgcccaacttaagtttagaagagaatcaaaatttattaggcttgtctataaaactgacatcagcattgaaaaagcaatttcattaatttaattaagttgccgtttctgtaaatttagaaaaaatacttttggaataatttatatattaatcaattatttcaatataaattgtttattttcatgtatcaatttgtgattaaaaaaccttgcttgatgaatgaggtatagatatgtatagcctctcaaaaactataaggacaaacaaggatgtaaaaattctagtagttgaagatgattactctcttgcactcaacttgcaagaacttttagaaacatgggaatatattgttgtcggtattgcaaattctgcggaaagtgcaattgagaaagcaaaggcactgtatccaaacttaattttaatggatattcaattgcctagagaagtagatgggatgcaggtagcaaaacaaatctggaatagtctaaaaattcctattgtttatattacagctttttatgaaagtaaaacttggggcagtacagaatttctacatcctttcgcctatattatcaaacctgtaacttatcagcaactttacgttgcaattgaaacagcgctagaacgttatgcaattgaagaattttcaaatagtgtactccaatgtgtaggtcatggaataattgttgttgattttcaattaagagttagctatctcaatcaattagcagaaattattacgggatggcagttaaatgatgctcaaggcaaaagcttcagtgatatcctcaaattaattgataaatcaacacaaaatctgattaagaaggctatagtttcatctcttcaagaacaaaccattcttgataaagaattgagtacattaattgttaataaaaatggtgcgactattcctataactaatagaattacctctctaatcaacagacaaggatttattgttggtgcagtaatagttatccagaatgatacataaagataggttatgaattaccaagatttagaaaaacgtaaagcattaattgtagatgatgaagggtgcaaccgactctgcattacttatgtacttaaacaagaaggttgggaggtaaatgaggcagaaaatgggcgagaagcaatagaaaaagttttggcatggcaaccacatctattgattttggataaccaaatgccagaattaacgggagtggaagtttacaaatatctccaattacatggcattaaactagcggttgtcttaatttccgcagacactgatttagagaaattagcctcagaggtaggtattgcttattatctgccaaaaccttttgaacttgaggcgttactaaaaactgttgattctgcttacgaaaattctttcaattaaaataagctagtttatgaaaatatcaaaatcaaaatttaattgttctgtttgctcataatcaagttagaaaatgcaaccatcagacaaactcaacattacagaatttattaccttagaaccaatcaatgtcagcaactgcgatcgcgaaccaattcacataccaggattaatccaaccgcacgggttactgctgacattgcgtgaaccagaactaaagattttgcagattagcgaaaatgttgagcaactcttgggttttacccctaaacaactgattgggcaaccattacgccgcctatgctccacagcaaaactaaatgaaatacgccaatatatccaaaaagataatttagaggcattttgtccattagaaatgaaaatacgcagtgcagcaatattatcacctaatcaaaaagtgcattggcagaacttcaaagctatgctgcatcgcagtgatggagtgttagtgctggagctagaaccgagtctaattacgaaaaatcaacagtttctcaagttttaccacattttaaaaggagcgatcgcccaaattcgccaaactcaaagctttgatgatttactgcaaaccatagtcaaacaagtcagacaaattactgggtttgagcgcgtaatggtttatcagtttgctactgataatagcggcgttgtagttgccgaagacaaagccgaacacctagagagttacttagatttacattatccagcctccgacattcctcaacaagcccgtcaattgtattacgagaattggctgcggctgattcccaacgctaattatcaaggggtgcggctaattccctcccataatccgattaactcgcaacctttaaatttaagtcaagctcatttaagaagtgtatccccgcttcatttgcaatatctgcaaaatatgggagtaacggcttctatgtcgatttccctaattaacgaaaaacgactttggggtttgattgcttgccaccattacactcccaagtacgttgattatgaaacacgcaaagcttgtgaatttttagggcagtttgcttctgtggaattggtttatcaacaagagcaagagatggagagttatcgctcccagataaaatctatccaagaacaattgcgacaggtattttctgctaatttcagctttattgaaccagtgcttcgtcataacgaagttgagttattgaatttggttcatgctcaaggagtcgcactcatcttagataatgaagtatctctatttggtcaaacgccatcaacatatgaagttcaggaattgattacttggctgtcacaacaagagcgccaaccaatttttgttactgattccctcgccaaaatttatccgcaggcgcagcaatttacaactattgccagtggtgttttagcaatttctattattctacgccaaaaatcttatcatcttgtttggtttagaccagagcaaattcaaacagtcaattgggcaggagatccccataaacctgtctctattaatactgaaggagaacttagcctaactccacgtaagtcctttgaactttggaaacaaacggtacaacaaacatcgctaccttggcaaccattagaaattgaagctgcaactcaaatgcgaaatgctctcatgctggcagtgctggagttttcgcaggttgctttagaacaagccgcagaacgtgcagcgatcgccaatcgtgctaaaagtcagtttctcgccaaaatgagccacgaactccgcactccacttaatgcaattttgggttttactcaattaatgtcacgcgctaataatactcccaccgaatttagagaaaacttgaatattattacccgcagtggagaacacctactgacattaatcaacgacgttttagagatgtccaaaatcgaagctggacaattgatacttaccgaaacttactttaatttgcatcggctgttgcgctctattaacgatatgtttgcgctcagagcctctcagaaaggtttaaatcttatcagcgactgggatgctacagttccctgttacgtatgtgccgatgaagccaaactccggcaaattttgatcaacttattagccaacgccattaaatttaccgccacaggaactattatcatgcgtggacgggcttttctgtctagcaatcgccaaaagcaggacacagcaaaccacaacaccattactacgtctaattcccctcatcttcaaccattcgtactacacctagaagttgaagatactggatgtggtattcccgcttcagaaacggaatctatttttgaagctttcatgcaaacacaacagggtcgtcaagctcaaggcacaggtttaggcttatccatcagtcgccagtttgccagattgatgaatggcgacattagcgtaaaaagcactggcaatcaaggttctactttcacttgtcaagtattactgcatttagctgactcggtagatttaatcgattcctctctcaagcgccatgtgattggcttagaacctggacaacccacttaccggattttagtggctgaagatgttgtagaaaatcgccaactactgattaagttattagaaacagttgggtttgaggtttctggtgcagagaatggcgctcaagcactctccctttgccaagaatggcttcctcacctaatttggatggatattcaaatgcctgtgatggatggatatactgctactcaaaaaattcgcaccacccaagctggtaaagatgtcgtgattattgctttgactgcttctgcttttcaagaagaccaggttgctagtctacaagcaggttgtaacgactatattaccaaaccttttacagaaacggtgttgtttgacaagatggcacattacttaggagtgcgctatctttacgcccaagaaaccgcatctgatttaaacttgccaatctcacagacaaaatctctgactcctagtgacttgcgccttatgccaccaggatggattgctcaagtacatgaagctgctttggatctagatgatgccaaactctacaaacttatacagaaaatccccagccagaataaatcccttgctgatgcgctgaaatctttaattgataactttcatcacgaagcgatcaccaccttgacccagccttaatattcttatgcctagacccctcaaacctgcttcacaaaccaatatcctactcgtagacgatacccctgacaatctacggttgttatccaaaatcttagaagttcaaggttatattgtccgcaaatcactcaatggcaaaatggctttacaggcagcagtgcgagaacctcctgatttaattttgcttgatattaatatgcccgaaatgaacggttatgaactttgtcagcaattaaaactagaaaaaataactaagaatattcctattatttttattagcgctattgatgatattaaagataaaatcaaagcttttgaaattggtggtcaagactacatcactaaaccattccaagaattagaagttattgctcgaattagaaaccaattacttatccaagaacagcaatatcaattagaacaagaaatccaagaacgtcttcacgccgaaaaacaaattaagctacttaatcaagatttagaaaaacgggtacaactccgtactcaacaattgcagcagtctttagactttgaggcgaccctgaaacgaattactgataaagttcgagatacactcaatcaacatcaaattctgcaaagtgccgtacaagaattagctctagcactacaacttaaatgctgtgatgccgcaatttatacaaactatcacgaatcctcagttattcgctaccaatatgctgctttagaggaaaatcctaatcaggggcaattgtcacacacagccgatgcaccagagatttatcaccagttacaacaacaaaagtcatatttagctttctgccaaattgagcctctccctattcgtaacgaatcagccattttggcctgtcccatatttgatgaacaggtagaagaaatcggcattttaggcgatttatggttatttaaacctaccgaggaaactttctcccaaatggaaattaatttagtccaacaagtcgctaatcaatgtgcgatcgctctacgccaagctcgtctttatgaagcttctcaagcccaagttcaagaactccaccgacttaaccaactcaaagatgattttctcaacaccattactcatgagttgcgttctcctatcgctaatatgaaaatgatgattcagttattaacggcttttttccagcaaggcgagggattaattcaaggattacctcaatccttgttgcatgagcatcagattgttgaatatcttaatttattaaataaagattgcgaatacgagttaaaattaattgaagatattttacttttacaacatttagaagctggaacatatcctcagcaattaataaaaattaatctgcaagatttgattggacatattatcgagccattagctatcaaaattaaaaatcaacagcaaacttttagtgtgaatattttagctgacttaccaaccattgaaattgattctttcagccttgggcgaattattacagaactaatcaataatgcttacaaatatactccacctggagaaaatatttctttgtctgctactgttgtcgatgacaatactgtactttctgataatgtttttcttctttcccgtcgttacatttcatttatagaattaattgttacaaatacaggaataactattcctcctgaagaacattctcgtatttttgataaattttatcgtattaatggttctcatcctggtaaaaatggtagtactggtctaggtctggcattggtgaaaaaattagttgaaaatctaaatggacatatttttgttgaaagtttaaataacattactcaattcactgtacgatttcctctcattaattgagacaaaatttaagaatacatttatctataataaatttctacaactttaattccagcctaaaattcccgaacaatatcttgcctaattccttaaaatcggagccaaacaactgagatacactaattttcgccttctcacacacaggaataatcaacttcaccaaatgataaggctgactttgatttgtttttgaagcaatcctcaacgattccatgattccccctaaatctcccaataactgcaaatccttgccaattgcttgttcaaacaccaacaaaattaattgtaattttcgtgttaactcaatcgggatgggtttatatcctaattcgggagtaagtgcaattaattcgctaattccttgaatattaactcgatatttctctatttcctcttcgcctttaatttcctgtcctaaccacccgtaacaatgagaacaaaatcccgcaggtgaaaacctcgccatcataggtaaacgcgaaccacagtgaggacattcttctattaatcgctgtttgtgaatcaaacaaaattctatatctttaaatgaccatagtaatggttcatagatagttttgttctcctgcttccacccttcccaacaacaaggacaccaagcgcgatagttccgaaataaccccttgtcataaatcattcctttccagcttaaaagggtcaaaaagcgtaaatcctgacgcattgttaactcttctaagacagtgactaactttcctgtcatttcacgcattccgttgatagccggtttagcatccctatttcccaataagtgactcaaattttttgccaatagctcagatttctcctcatctttaaggataagtggcgcaatttctcccataacgagcttttgagtggttaaacaatgcgcctgcgccaaacgatgaagatagctactaagactttctgcgtaggaagttcccaccgccacaggttcaagagagaataaccgacttcgttgcgggatttctagaggtattatgctccaatgttccaagtaaatagtcatttctcttggattaacttaagctgccactaacttgacaatattttttaacgaagagttacgctctccgttttcgatacctcagatttagttgggatgtaactacactcatcattcaaaataattacacagaaatgcctataaagcttggatgcaaaaagctcttgatttggctgtccaggcgatcgtagtcataattttattgttattattcatatatacaagtaataacgatttcttttaatcaagctaaacccgttatgtgtctgacgtgtcttttggaattttaggcgcagaatttacaatttcgtctatccatcgcctgagagaatcattttcatctctcaggctgcgaattttcccaagatttcattttgaattactgcgacttggtgctttagattctctaagtctgtgtgcatggtagttaaatctggtgcttccgggcgttcttctgctagataggaacgaatccatcccataattagttccgaagctgttttcccttcagactgaactttattcataaaagcttcctttgtctcatcgtccattctgacgatgatttgattgttcagctttgtcatctgacgctttgccatgttaattatcgcttcaaaccctaaatctgtaataactctatttacctccattttgtatagttttggaaattttgtagtaactctcttgatttagtaataacaagtaactacaatagagtaacaagacaaaggagatcgccctccgtccaaagattgcgatcgccttttgtaaaaccccatcagtgaggttattcacatgattacacaagaagtatttgacgaccaaactttgacgcaatcggagtttgaggcatacattgaccagctaactgacccagcaccaccagaaatagaaattgactcagtgacagatgattttggagaactttatcgagtttggaatggttcgcaactactaggtactttttatcaaaaccttgagaacaaatggatagcgcaaccttgtaatagagatgaaagaccttgttgcgatactgctttgcaagcacagttgatcatcatagctgttaatggtttgctagtagcagatgcagcgtaaaagctttgatagataaatttcctattacctagagacgtggtttattcccgtctctttatttattggcttcgcctggcaatgtgcttgccgttattatattttctttgcaaaagcaaatgctggtgagcaaacttgtttaagcaatatcatcctctacattactttttatagaattattgactgcattacgcgctaaaactatccctaaatgaactgattctctattaatataaaaatcatgattacctgtaatgatataattttcctttgttcttgtactttcttccagaacatattttagaaaaattttcctaaattcattaattcttatatttttttcagttatttcataaatagaattttgaatcagactattaaaaggtgtaggatggataaatcttttaccattcctttgtgtaaatagataattatgtgtaggtcggaatatctgccttagtccagcaatctcatctaacaaatgtggcttgctttgataagtatatatttttaaccactcttcgagatattgataaaagctacgtccatcagcataaagtatatttggtatttttaacttgatttcattatatttttttgttgttttatagctatcagataaccaatgaattatccaatcttcattttcttgatagacgtatccactaactacttcatttgatttttcagagacaatagcttcataactatcaacaaactttagatttctatataattgctgtcgctgcggaggaagatatgtcatgaatgctattattatgaaaatttgatatatttctgcgatttctattagatgtgatttattgataatttggtattttaatctacattgctttctaagattctccactacaactaaaatctcagaccaagttagtattaaatccctgttcaaaactatatgacgatgttctttaaccttcttttgggcaatagccattgcctttcttaattcttgaataactggtaaatcatcatactgttctctagcatgaaaacccattttttggtagtacaggaattttgctaacactaaaagagttctaaaaactgcaaattccgtataggggctgtcaacacctctacctctcttatctattatttcgttttgaggatctgcttttaaccaagctagatagcgttctgcaacttgcaaagttttttgacttgctgccgggtcgctgactggaactattaattctaaatccaatttttcaataggtactttttcgatacggtaaaaccagcccaatataagacgagtctgtttcaagtattgttgggctgtagttggcgaaataatttttctattctgctgctgattctgctcagtaaaaaatttttgtaaagcaaccatcacctcttggatatgttctactaatgtatactcttttcgtgtacctaaagcataatgttgtttaggaattggttgttcagcatcattttgattatcgctggttatttctttagaatcttgtgcataagaaattttccgctttctagcattactgatgggggatgccgtactaaagttttctatccaccaaggctgctgctcgcaccacttcagaaattggttaagtgctgcgcggtaagtgtactgacttttttctgatatcagtagctcatcaaaaactttttgttgaatatcaatcgcttcaaatagtagctccaaagacaagcttttcatgaaatctagagctttttcaatttcactattggtgattcggggttgtagaggcgcaggaaatccccatccaggcagagtaaaacgtaccaaggcagtttgtgtacgagacaaagtagctttggctttttcctgaagctgttgtgtttgaatgtgctgttgataaagattccaaatatcaaacagtgaaagaagattgtccaccagggcaatgagctgattagccttattgtcaaaattttgagaacaataccatcttaaaactcacttcaaatattagaaatgtaaatttttgttgacaaaaacctctgctgtgaatttgattcagttttatattgtatttttatgtacataaatatcatgtcgtcagccaggagaatctccaaaacaagcaaacttgccttatcagcacgacttcacatttcaattgattaactcaaatgcttagtgatattgaatttgagcattggtgtcgccgcctcaatctttctgaacaagctcggaaggtaatagaacaaatccgtacctctgagccatcacggcgtgttggtggtggtaaaaagaacgtttcaggccgttacccaagttccaaaatgggagtaagtatccagtttgaatcacaccggaatgaattagcccatatttataaactggaaactgatgatgatgtattggagtactacgaccaacctcctccgatttttctggattacttgagtaaaaatggcaggcgcaattaccacagccatacacctgacttttttgtgatccgaaaaagtgcagcaggttgggaagaatgcagtgtagagcaaaatttacttaaaaaagtacaagatagtccaaaccgttggcagaggcaagaagacggaacatggatttgtccaccggggaaagaatatgctgctcaatttggtctttattatgttgtccgttcctctgcggaaattaattcaatatttttgcgtaacttcgtttggttggaagattatttaaataaccagcaattaacagttgatgatgaaatcactgatgctgtatgcaatcttgtcaaattacagccaggaatctctttagccaacataatttatcaaattaaggaagccagcattgatgacttaaatactttgatagcgacaaaccaagtatatgttgacctcaacacttatcttttagctcaaccagaaaaagtaaaagtctttctagacgaagaagaagcatttacttttaaccaaataactaaggtttctgaaccacaagctattaacaaattgggcatttttaaagcctctgttggcacatctatattttgggatggtagtaagtgggaaattgcaaacacaggcgaaaaatcaattgcacttatcacacaagatggaaaatttattgatttacctaatcatgtttttgaaactttagttagagataagaaaataacaagcctacaaacaccagaagaaccaacgattaattctgaagttgaagaattacttaggaaggcaagtacagaagatagaaaagaagctacctctcgctacaaggcaatagaagcattcctaaatggaaattcctctaataaacctaatcgctctcaaagacgttggattgctagttaccgaaaggcagaaaaaacctatggtagaggcttcattggacttttacctaaacatagagataaaggttggcgtagacaaggtatcccagaggaagtgttgttattcatgcaacaacacatagaaataaactacgaaaacattaaacaacactctatccgtcatgcttatcagtcttttaaagatttatgcaacgaaaaaggatacaagcctcctagttcggaatcataccgtcaagcagtaagaaaccgccctcaatataagcaaattcaaaagcgaatgggcgaccgtgctgcttataaagaagagcctttttactggtatatacatcgagaggaaacgcctcctcacggcgatcgcccatttgaaatttgtcatatcgaccatacggaggtagatgttgaactgctcagtgcaatcatgctaaagctgggcatggatattagcgtcatcaaagaaaaagccagtatggggagaccttggttgaccttaatgcttgacgcttactcacgaagaataattgctgcatatatgacgttcgattccccaagttatcgttccaacatgatgattttgaagatgtgtgttcagagatatggacgactaccccaaattatagttgtggatggaggggctgattttgggggtacttattttgaaacacttcttgcttacttccgtgtcaccaaaaaagagcgacctgcagctaaagcaaggcatgggtcagttattgaatcttatttcggtgtagctgataaggaattttggcataacttgatgggaaatacccaaattacaaaaaatgttcggcaagtaactaaaagcgtaaatccaaaaaacaatgctgtatggacacttgccaagctgtactcctatttttgtgaatactgctatgaaatctatgacacttgcccacaccctgctttaagaatgagtcctcgtgaggctttcaatatcggtacagcaagaagtggtagtcgagaacataccttcattaatgaagaagaattcaaatttttagctctaccatcaccaaccgactctgccggaaccagaaagataactcaagaaggtgtaaaaatcaattatctatactattggcactcttgttttagccgttttcgcaatattaaagtagaagtcaaatacgacccatttgatattacgcaagcttacgcttatatcaacggcgaatgggttaaatgccactctcgttatctgcgagaacttgaaggtcactcagaacgagaactgatgattgcagcagctgaattaaagaagctcaatcgaattcaaaataagcagtttagtgatatcacaggcaaaaaactagctgagttttttaggcggatagaaatggaggaagctgctcttgctccaccttggctggaagcgaaaaaggcagtattacaacaacgtttgagagatagtgaactaaaacaagtccacgctcagatagaaggaaaaatagatgagtctgaaactatcacatctaccaatgtagaaaattctgcatttattaaagcagaacatttaacaaagcagtttacagaatcatctcaacaagagcttgatgatgaaaacttggtcgaatcttttgaacctttagaggagtggtaatgtctggacaatatagatttccgcttgaactacttgagcaaccaccacaaaaaagattgcaattctttaaaaatcctggtgtcacaattatgcaccacaaccttaagaatgctttttacaaattacaccgtattattcgggaaccagcaggaagctcaataattttagtgatcgggccttctggtgttgggaaatcgactttactgcaattactaaaaaacaaaatcattgaggagagcttaggccaaatggaagcagaccctggttggattcctatcgtctgtgttgaggctcctgcaccagcaaaaggtactttcagatggaaaattttctacaggaaaattttagaggctgttgatgaacctggtattgaccaaaaaattaactacaactcagacggcatacgtcgagacagtgatggaaagttggcttttggagccaaagctacagaagattcactacgcctagcaatggagaaggccttaattcaccgcagaccttacactctgagcgtggacgagtttcagcatattggcaaaatggctagtgaacaattgttgcaagctcacatggactgtgtgaaatcggcagtgaatactaccaaaatcccttggactggttttggtacttatcaactacttaattttctagaacttagcccccaactaagccgacgtaccaaaatcatgcacattccacgttatctactagaaaaagacgaagacatacaagagtttaagagagtgttagagcatcttcaataccggatgccactacaagaaacacctcctttaaaggagaaatattgggaattttgttacgaacgcagcattggcaatattggtactctgaagaattggcttacagatgcctatgaccttgctgtatttgaagacgcaaatactttaactttggaacatcttcaagaaacagctaaatcttcttctgagtgtgaacagatggctttggaagcaatagagggagaagaaaagctgacggatagtcaagataaaagtaaaagtctgcgtactattctcggattagccaaggatgaaacccaaaatagtaataaatcttcaactcatgtccaagaacacaaccaaaagagccaaaaatctagtaataaaacaaaagcattcaaacgtaatcctagccgagatccagtaagaggtgaaccagtatgagttctaaagagtttgattttatagagttgtgtgatttgtaattacttggtattccaaagtgtcgagaacagaaaatattggcagcattattatgaagcaaggctacaagttgggttagaaagttaattttttagagatttttttaactaaaaaggatgttttattttgatgaatatcaatattagtagtgaactacgggagcttagaaaatctcaattaccaactcgtagccgtttatatcatctaaaacctataggggtaggaacatcaactgtagagagtctgacaagttatataactcgactagctgtgtctcatt

SEQ ID NO: 901 - DNA, 21136 bp, Nostoc sp.
  source 1..21136: mol_type = other DNA; note = NMS9
gcacttgcggtggtgtcgaatctggtggataaatcacatctacctgtgtaatttaaagcttggttttgccgtactttaaagtttgattttgccactacattgcctcaatcccagtaaatctgttccacgaatatccataatataagcagtttttaaagcctgagtttgccggaatagcaattttaaagtttgacattgccgaaatagtctgaacttgttatggtgtttttataggtaaaattgtactaattttagaggagataaccatgctctacgatgtcgagtttcaagcatggtgtgatagtttgcgactctcccaacagcaaagagatttggttaaccaaattaggacttccccaccagctcgtaaagtcaaaggaggaggaagaaacgttcatggtttctatgctagctcaaagatgggtagaacgattcaatttgagtctcatactgttgaattaccagctattactcaattttatgaatatgatgaccaagttttagaatattgggatcaaccgattaaattcagtattaaatgctcaccacaaggtaaacaagccacaactatcagtcattatcccgatttttttgtaatgagaaagaatttttgtggttttgaagagtggaaaacagagaaaagactggaaaaacttagtggggaacagcctcatcgctatcaaaaaatagaaggacaatgggtggatgtcattgttcaagaatatatcgaaagcttaggatattattatcgtcttcgttctgatagtgaaattgattggatcaaatatcgcaatcagaaatatttacaatcctacaaacaaggatatttaaatcaagaatatatccttaatgaccaaatagaagcaaatgttcaagagattatcgttaattatcccggtattaacctcaccaatctgcttgagaaggcgaaaaatgccactattgatgatattaataccttaattgccctcgaaaaagtctatgtgaatttaagcgaagtagctttggtggatcaagagaaagttcatctattccgtgaccaagctaccgcagaagcttatatcacggtaactcatgattattgtgaacctgtatccagcaatgtgtcgatagttgaacttaaagtggggtcatcatttttgttagatggaaaaagcctcaccattgaccatattggggaaagtaaaatcattcttagaggagaacaaggaattattcgctggacttatgcagaatttcaacaattaatcgaattaggagaaattagtaatcttgagacagaaaaccacacaactttagatgaggaaggatggcaatactttctagaggccagtcctaaagccttagaaattgcaaattatcgttatgcagctattcagccttttttagggaaagaagctgataattctcaaaaatgcgatgatctatcagaacgaactctacgcgactggaaagcaaaatatcgaaaagcccaacaaaaatacggatgtgggtttattggcttaattccccaatacaaaggcaatccaacccctcgttattctgatgaagatttagaatttattgataaagtcattaaagaacaatatgaaactcctaaacaaaaaaatgtttggcagacgtataaatttttagaggataaatggcagaaagagggacgaatttctcctgttcccagtcataccttttattacgagagagtgaaaaaacgaaacagctatcaacaaactaaaaatagaaggggatctcgtgcagcgaataatttgttggggccttggttaattcaacctaccaccccccgtcatggagatcgcccgctcgaaatcgttcatattgaccacacaaagcttgatgttgagtgtatctgtccctatagtggcaaaaatttaggcagaccttgggtaacaggcatgattgatgcctatagtcggaagattttagctttataccttacctttgatcatccgagttaccgttcttgtatgatggctattcgcatctgtatacaacggtttggaagatttcctgaattgattgttgtggataacggcaaggagtttcgttctacttattttgatacattattagcgcgttttgatgccaacaaaaagcatcgtcctaaggattgccctaaatttagttcaattattgaacgttggtttggctcacaaaatactgaatttattaataacttgagggggaatacccaaatcatgaagcacgtccgcctcgttaaaaaagcaaataatcccaagagtttagctgtctggaatttagaagaattatacgattatttggcatttggctatgcttatggagtttatgataaagcagaacatcctgctttagaaggaatgtcgcctcataaggcttttgaattagggttagctaaaacgggacatcgccctcatcaatatattaagtatgatgagcaattcaagattttaaccttgccgacgaacaataagggaacggccaaagttattcctggtcaaggaattagagtcaactatcaaaattattggacagatgaattttacagtgttgagaatcaatctattcctgttcgctatgacccactagattatggtgttacttatgcctatgttaataatcattgggtaaagtgtttatctaattattatatgaagtttcaaggacattcagaaaaggcagtagcaatagccacaacaatttgcagacgaaaacggcaaatctataatcaaagtcaatatgtaggttctaaagagattgttgacttacttaataatgcggaagagcatgaagaattaatactacaaattcgtcgagatcaatctgctaaattagttttcaatttaattgaaggaaacctgagtagtgcggtattattaaatgtatcaaatattgagcagcattcatctcaagatagtcaaacaatagaaaaaaatctagatttaatagatttaaaagaagagaattcacagcctagtatacccaaaaaatttaatcctgatgaaattcaggtttttgctgaagaggaattgtggtaatggttacaaatcgtcgtttccctcaagaatttttacaagcaccaactgataacaaacttaagtattttaaagatataattgttcctcatcgcaatattaaactggttctagagcagctactaaaaaatgctatagaaccggatgatgctttagtttatctggtgtttggggtaacaggggtaggaaaatcacggttaaaagcagaatttgaaaaacgattgcttaaacattttgcagacaaaattatttctaatccaggaagcttagtggtaggaggaatcgaggtagatggtgctgaaggaggaaagtttaactattctgattactatattcaagttttggaatctttgaaggaagttttaattgattataaagaaaattatggagttgatttagaggatgacaactcagataatttaataggagatcatgaaggaaaaaatgctaaagctttgcgtcgaacaatgcaaaaggtttttttacaccgtcaattaaaagcttataccttagatgaagcacagcacttatttgatgttgcaggaggaagacaaataaatgttcaaatgaactggcttaaatcactggctaataaaactcaaacagttcatattttatttggaacttatgaacttttaaaatgtcaagaagtcaatggtcaagtgggaagaagaagtgaagattattatttacctccctactatctgactaaatcagaagatcaacaagaatttattaaggtaattaagactttacaacagtatttgccagttgaagatgaaccccaattagaggaacattgggaatattttatggaatactcgatagggtgtgtgggcattcttaaaagttggtggtatcgcgctctcaaaaatgcgttagacgagggggctaaaacagtgaggatgaaagattttaaagcgagggaattatcagcaggaagacgaaaaacaattcaaaaagagttagaagcaggagaaagccgtttagcttttctatataagaacgaggaaaaaattgaaaagcctaaatctatgaattctcaaccagtgaaaaaaggtaggaaagttggggaacggaaggtagggagagacttggtaggagttaatcaagagggatgaatatttatgaggaactttggagtccaaaacctctagaaatccctcaacggagtcgcttattttgtcttgaacctgtgggtgtaggaactccccatacagaaagtctcagcagttatcttaatcgtttggcacaggagcattgtttaactgcccagaagcttattatgggggaaattgcgctacttattttggaaaatgaggataaatcgaagttactgcaaaagagtgtcagctatttattaggaaatagcgatgctaaaccggctatcaacggaatgcgagaaatgacaggaaagttagttactgtcttagaagagttaacaatgcgtcaggatttacgctttttgacccttttaagctggaaaggaatgatttatgacaaggggttatttcggaactatcgcgcttggtgtccttgttgttggcaagagtggatgcaggagaacaaaactatttatgaaccattatcatggtcatttaaggatgtagaattttgtttaattcacaaacagcgattaatagaacaatgtcctcattgtggttcgcgtttaactgtgatggctaggttttcacctgcgggattttgttctcgttgttacgggtggttaggacaggaaattaaaggcgaagaagaaatagagaaatatcaagttaatattcaaggaattaacgaattaattgcacttactccccaattaggatataaacccatcccaatcgagttaacccgaaaattacaattgattttgtttgtatttgaacaagcaattggaaaggatgtgaagttattgggagatttaggtgtaattatggaatcgttgaggatagcctcaacaacaaatcaaagtcaaccttatcatttggtgaagttgattattcctgtgtgcgagaaggcgaagattagtgtatcccagttgtttgggtcagattttaaggaattgggcaagatattattcggtaattttagtctggaattaaaattatagaagtttggtataaataaagattgatatcaattccggttacatcggtattattccctttttcacctaacgtttcaggagtattttgctgctagagaaatttctttgtgtttggcttcagggagtgcgattgctttccgttactgaaaatatggaatagaatcatccgactgatactagaaaaaagcacgtattttaagagcgtgctttttattgtcaggcggtcgctgccaagatgaacgacgagaaagcattaactttagtaattttgtaagcaacatgacacagcataacccgtcagataacagccatgtcacagagtatttagattattactgtaatttacctgatccgcctggatttgccgttttacttaaaggagagtggggatctggtgagacatggttcatcaaaaggtactgcgaaagcttaaggcagaaaaagcggaaatgcttgtatgtcagccttaatggagtgacttcattttctgaaatagaagaagctttcttgcaacaacaaattccttttctagcatccaagccagtggcgataggaagaaatcttattacacaagttttaaagaatagtttaaaactagatgtaaataatgatgcaacattaaatcttacaactccaagtataaagcttactgagctttttacaaatcttgaacaaagtattttgatatttgatgatttagagcgatgtagcataaatctcgtcaacatactgggatatatcaacagttttgtagaacacaaggaattaaaagtaattattgttgccgacgaggaaaggctaaataaagacgatttcaaagtgttcaaagaaaaactaattggtcaacctatagcaatttccctagaatttgacaaggcactcgaaaactttctacaaggggtaaaaaatcaagatgcaagcaagctattgtctgacaatactgaattaatccaagacttataccagcaagcacaatgcaaaaatctaagaactttaaagcaagttgttttaaattttgaaaggatttttcatgtactaccagaaaaagcgaagaagaagccggaactccttcaagaaattttaaggttccttgtgcctttttcaattgaaattagaagtgggaaaatgctgcctaaagatatcggcagtttgctacaagaatctgcaaatataaggatggagattagacctgggttcactaattcagatacagggcagaatgatagcgaaggaaaaacacttcaggaagtaattaggaaatatcctgggttaaggttgtacgatccatttcctagcacaagatggtggcatactttctttgataaaggcatcttagatttacaagaactcaatcaatcacttgctagcagtatatattttcaagatgaaaatacacccaaatggatgaaattatggcattttcatcatcttagtgatgacaaatttattattttgctcaatgaagttgaaacacaatacttaaacagagacacggaattttttgatctcggaatcctaaagcatgtaacagggcttctactctatttttctgacatcgggttatattcaaaaactaaagaagaaattttgattaattcaaagctctttattgattggctgaaaaataataatcaatcaaaactggcatcttattcagtttctacgtatgaaagtatgtttgggggatacatggggcttgcgtttcaaggcgaaaaagttcaagaatttcaagatttttgtacataccttgaaaaagctcaagagttagcaagggttgagattttccctaatcttgggagagagctacttgctatcatgcaaagcgataaatggaaattccacgacataatctccttaaataactctcatgattggggcgtgccagggctgagatatgctgaaatacctatattgaaagacatagaaacaagtgaatttatagaaagcttcctgcaactcaaatttgaccatcagatgactattggttatgcaataaaagaacgatataagttcgatggcaacaatgaaaaattacttgaggaattggattggcttaaatctgttcgggatttattactggatgaggttgctcggagaaagggcaagccgagtggacactctatacaagtactaatcgagcttgatctgaatgaagcgattcaaaagcttgaagcgacagcgcatcgattacagcaatcgcaaaacaacacagcgatagacaactaattgtcaaaagcaggtggtttgtgaggggcgattggcgatcgctttacttaggattgagaacaggagggagatcgctttatttgttgctacgcactggtgggcgatcgcctgctttcagaactgttttattcttcctccccaagctcaccaagagcgtcatcaaatttgttgatgatgtcgagtaattttgatacgactcgcgcaaagatttttttacgatctaataatttgggtttttcgttacaagcactcagcacagtttctcttaatggctctttccctgaaaatttatagtcagcaatcatttgattaacaacttcgaccttgaggttttcctctatacagagttgctgaattgcttcaacacgttcttgagtccaaaagtcttgaaagacggtttctactttttcttcgggttcaagggtaggtagccgctcttcaataaatttctccagcagatcccgtttacttcgtaattgcgcttctttgccaataatttccaggatagaggctttttggctctggtactcttctgaggtgacatctgtttgccgatcgcgctggaggttagccaccagcttgagaatataggcgacattgatttcgtctcgctggatcagttccagttcaaaatcgacttcctcaaccaaagattctttctcttcatctggtttggatcgcgttttatcgtagatgtccagatatttgcttttataatcttcaaaggtttgttcatccagattcaagtcagaaaaactaaattcagtaaatgatttacttacattctgtaaacggataagattacgaaaggctttaacaaacttaacttggtcgtcttcactaataagcttattgacatcgttagggatagtgacaatcactctcagttcttgcacacctttattaaattcctcaatgtagtattcgtagggttcaatgaaaatttgttcattagcattgggatcggaaaagagtgcaatggcttgatcggtattctccttaagattgcgaaagcaaacaatatttccctgagatttaagttcgcccaagatgcgattagtacgggagtatgcttgaattaacccgtggtacttcagatttttgtcaacgtaaagtgtattgagctttttgacatcaaagcccgtgagaaacatattgacgactaacagaatatcggcgcgttcctgatcctgaaagttttctcgatcgcggtctttcatccgcttggcgatgtctttatagtaggcatagaaagcctgactatctttggcggaatgttgggtttggtacatctggttatagtccgcgataaattgattcaatttgtcgcgactatggctacggttgctcggatctgtgctgatattgaaatcaggttctccaattaagccgtttgcgtcttggtcttcttcgttatagccaggagtaaaaattgtgatcactcgtaggtcatgtaatccctgtttttgtttgtttttgaacgtgtcgtaataggtaattagggtgtctacgctgctggcgcagagcatcgccgagaactttctaccgtgggttttacggttatggttagcaataatccaatcgacaatcagagaaattcggtcggggttttcaaagaattcgcggtctgattttggctctggaatgagtgttccatctttgcgtttgagtttgccccaatactcgacggaaaatttcagaacgttttcatcagcgatcgcattagtgatcacatatttatgcagacattcctggaataggtctttggtagtgcgtttaccttgttcgttgctagcagcgttagcggcaaaaatgggagtcccggtaaagccaaacatttgggctttggtgaagaatttgacgatatttttatgggtttcgccaaattgggagcgatggcattcgtcaaagataaacacaatgcgcttatctttcaagctctccattgcggtttcatggcgttgggatttgatcgctcggttgagtttctggatagtggtgacaatgagggggttatcccctgcaatttgttctacaagttgtttggtgttgtcggtggtgtctacgcaattaggactgaaataattaaattccttgctggtttggtagtcaaggtcagcgcgatcgaccacgaacagcactttatgcactttggggagttgggtgaggatttgggcagctttgaagctggtgagggttttacccgatccggtcgtgtgccagatatagccgtttttatcagtatccttgactcgctcaataatggcttctactgcgtagtattgataggggcgcagcaccatcagcactttgtcagattcgtgcaggacaatgtatttacagatcattttggaaacgtggcatttttccaaaaagctgtcggcaaagtcctccagttgggttataaggttattgtcttggtctgcccagtagaacgtttgtttaaattcttgtttacggttgttggcatagtagcgggtattaactccgttggagataacgaaaatttggacatattgaaacagtccattgtctgcgctgtaggaatggcgttggtagcggttgatttggttaaaggcttccttaagttccagtcctcggcgtttcagttcaatttggacgaggggcaaaccattaatcagcagggttacatcgtagcggtttttgtatttgccttgctgggtaatctggttcgtgacttgatattggttttgacaccaatgttcggtgttgaggaattctaggtaaaaggtagtgccatcgtcgcgcctaagttccattctgtcgcgtaggcgtttggcacggtcaaagacgttacctttatcaagatggttgaggatgcttttaaactctgtgtcgctgagtttgatatggttatgtttttcgagttgagttttgaggttggctttgaagtcttcagcgttgcgaagggtgacaggttcgtaacctagtcccgttagacgtttgatgagtttttgttctagttcggcttcggtttggggcataggggaatggggaatacaataaaggtattatttattgcctactacctataaaatactacctattcccgaatggtgtctgttggggtttctgcggagagggttaaaccgcgatagacttgttcaataggaaaattgaggttaatgcttttgagttcgattgtgtcgcctgctttgtagttgataatcaaccagtcccctgcgtcgtttttgtgatacaggtcgatttcgatgctggtggaactgactagtaggtaatctattaaggttgggttttggcggtacattcggaacttgccgcctctgtcgtaggcttcggtgctggcggagaggacttcgacgattaagcaggggtaggtaatatattgggttgtggttttgtcgcgatcgtcgcaggtaacgctggcatctgggtaggtatagttattattgccaaagatattgactttgacatcagaatttccagtgatgcaacctgtcttttctaagtggctgtcgaacatggcggtgaagcggatggcgatacgaccgtgattgacgctaccgccgctcatggcgtaaacttcgccgttgatatactcgtgcttttccagttgagttgcttcccaggcaaagtattcttctggggttaagtttgtgggtttgtctttggctgcgatcattgtggggaaactcctggattggatgactcgcaaactttcatatagaaaaatctctgctgcactttattttacacaaatagatttatccgtaatgccctactcttcgtctaacaatgcttgttcttttggttgcagattctttaatagctgtttcattaataaatcttgtgatagaaattttatatattgaatcttcttcaagatcagagcttgaaatccaaggaatttttccaccaatccaataatttttttgagatgtgctaggggttcctcctccgagaaaagtacctaattctcctaactttttcttttgccagtcggggaagggtgagccgatcgcagacttaaatcgaattttttgggagaagattttttgtattacgccgcgtttgtaggtttgcaagagttcctgcttgcggcgtagttgcgttagacggcgatcaacagcccccaaaaaactagcaatctttttttgttcggcgatcgagggataaaataataagatttgagataatgaatcttgatttatattcgtattagcgctagaagtggcaaaagataagatttcttttctaaatgatgattcagcgaaacagtattttttatacagatgataaagagtattagatttttctcggaatctaatgataaacccactgtaaacagtatcttcaaaatggtcatttactaggcatgattgaccaacgccttccctttttactgaggatctgacgaataagacatcacctttttgaattttgtattgctctaattgtttttctggaatttctactcgttcaagatatgtcttttggatctcacttttgccaaaaatatccattaaattgacaaattctacgccagatccaaatgcttgtttatccgcgttaaaaccattttttaagtcgccaatttgatcaagataattagattcccaattatccttaaactcaggaaatctcaactgaggaacttttttatttaacttcttactcataacggcgcatcaatccccaactcatcacaaaaccccttaatcgcctcatcgatcgccaccatatcgcgatcacactgcctcaactccgccgctacagccgccagatcaatctcctcctcctcctcaaacgtatccacataacgcggaatatttaaattaaaatcattctcggcaatctccgctaatggggcgcgatagctatacttgtcctcctctatcctttggcgataagtggaaacaattttttcaacatcctcatctcgcaaatagttctgattcttcgccttctcaaaataggcactggcatcaataaacaaaacatcttcaggagattcccggcactttttcaacaccaaaatacaagtcgggatactcgttccataaaaaatattcgcaggcaacccaatcaccgcatccaaccaattccgctccttgattagatactggcgaatatgcccttccgcacctcctcgaaacaaaaccccgtggggcaacaccaccgccataatgccattctcatcgaggtgatgcagcatgtgctgcacaaatgcaaaatcagccttagaagccggggctaacttcccatactgactaaagcgatcgtccgactcaaacagcttattcgcactccactgcgccgaaaacggcggattcgccaccaccgcctcaaaccgcattccctcatgctgggggttctctaacgtatcctcttgcctgagatcaaaattccgataatgcaccccatgcaaaatcatgttcatccgtgctaggttgtaagtcgtgcggttcatctcttgtccgtaaaaatccccgactgattctacctcccgcgccacccgcagcaacaaagaacccgatccacaggtggggtcatacaccgacttcagccgactcttccctgttgtcacaagctttgccaacaccttagacacctgctgcggcgtgtaaaactcccctgccttcttccccgcaccactggcaaactgcccaattaaatactcataggcatcccccagcacatcgctctcggtttcctctagccgaaaattaatcttatttagatgcactaaaatcttggcaattaaagcatttttcgccttcggagtccgccccaacttcgtcgaattcagatccagatcctcaaataagtgatcaaaatcctcttcgctttcttcccccatagttgatcgctcgatgctgttcagcacttgggttaggtcatccaaaataaagttagatgattcaaaatcctcatctgctagattttcctcatgggcttttttcgctcctaacgcccgttccgctaacgagctaaacaactctgacggcttgagaaaatatcccagggtggcgatcgaatcctcttgaatcgcctttaaatattcctgcccttcctccgaagtttcatcaatctccagaaaatcaatgccatcctccgctaacaatttattggcataaagatgctgccgctcagagaggtacttatagaaaataaaccctaagcaataatcccgaaactcatcagcattcatcttgccccgaagcgagtcggcaatattccaaagctgggtttctagctttttcttgtgtccgttttgtccgttcagtccgttcgtcatttatctctcgtactgggcgatcgctagcactgccaagaagtggtgtctgagcaacgtatagagtaacacacaagatgatttgtttgtacagtgtgtaagtcctaatattgtgctagatgagcatagcaagtttatagtcattgacccgcgcgagaaaacgcagctaaagatgctaatggcttaccaggaatcaaaatctcaatattgcgatcgcatttttattcatagcaaggcaaaatccgcaagtttggacttctgttgataataatgaaaaataaatgccttttggtgcttcagcgttagtttttctaaaggagtcccactttcgctctaaatcgttatagtttgtaaactgtagtagctcaaaaatttatattttgtttactgctgtagctattatatgtctaacaagggtgagaaagaaagcagaatttatatttatattgaggacgttgtatctgttgcctggaacaaagatagaggaacagttttaaaaaggttacgtggaaaaaagtcacgccagaaactggctgatgaaattgctgccaaaggcggcgagtgttcgcaccaaaatttgaaaaaattagagtatggtgagtctgaaagtgtttctctaaaagtattagaggctatttgtactgcattaggaatatcggtaaacaattttttaagcacagtcgaagtgacaaattaaagttttaaacacacttattgattttagctactaaagtaactaatatattgatgtactcaaaaaggcgatcgccctccgccaagagaaatgcgatcgccttttgttcaaccccgttaatgaggtcactcatgatgattgtacaagatgactttagtaactcagccttggctgaatcagagtttgaggaatatattgaccatttggccgatccagtagcaccagaaattgaaattgactcagtagcagatgacttgggtgaactgtatcgagtctggaatggttctcaactacttggcactttctaccaaaatctagaggggaaatgggtagcacaaccctgtaatagggatgataggccatgttgtgatagccctttagcagcgcaaataattatcatcgctgttaatggcttactggtagccgacgcagcataacacacaaagcactttatcccatcacttggagacgtgatttagttcacgtctctttcttatgtagaggaataattgggttaaacaatttaagttttactacagcaaaaatttatgcgatcgcacttttgatatttggtaatcaagctgactctaactcttctatgctcattgtcgaatttcaccttctgctttacaaagctaattttcgttctcgtagtaagagttagactacgccccggttctgcatctttaaccgtaccatcaaaggttagcggaagttgctgaaggaataacctaaccttatcaagctacgaatcgcttctgcgatcgtagtcagtaatttgacctcgatatttgggcaacgcctaacggcataaagccaagaatcacgtggtgttttggaagacttcccgggtatatcgccattgagcaacgcctaacggcataaagccacgaatcaccgattttagcccaactttaatgtgtgaaatgtgtgattgagcaacgcctaacggcataaagccacgaatcacgatagaatctgcggttaattttgctactccataaagttgagcaacgcctaacggcataaagccacgaatcacagcaaagttgaaaacccttaactgaggaaggttcatttacaatcttacaagtactttccagatcgagaaaccaaaaacatacaatttaccaaagtttctgtcactttcagcccctcaaacccagtgcagataaactttcccaaaaatggcaagtaccttttttattatctcaattaccatatcccttatcgtgtaaaccttcccaccattcttttaccctaaattccctttcccataagagatacttgtcaaattggagattgaatcatcgtccacgccaaatcaggaggtgttgagcttggcattttctcaatccgatacctcaaaaatcgggtatttcttgaccccacatggtcaacccaatagggtaaggttaacctgcctcgattgtctctaatcgcccactgtctcaccccctctagataatcttccgagacaagtttgatcgttttaatcaactggtcactttctcccaaaaataaacaaccaaaccgtcttactagctcaggatggtcaaacgctaactgtatcctctcccttaaacttggttgtatcttctcctcgtcagaacgaacccaaattaaacacttcagattagacaaaatttcttgataacagggaataacattctctggatggctaaaattagcattcttaaaccgtctcatttgacgcaaaattcgcgattttttggggctagataacatcgcgatcgccaattctaccccacagtggcgatagacattcgtttcccctaccaaagacaataacatcccatacactgtcgctggaggagggacaggataggtttttcccatttcccttgcatgtgactcccgaaaagtcgcaaatggaacatccaaatagagaattaatggtgcaatcattttgattcttctaagcccaaatctcttttaatgactgttttcaaagcttcaatcagttcatttcgattacgataaatatgcgccttcttaaaaagagaattatcaaaattatctaattgctgtaattccttaacaattgttcccccaatccacaatttactatggtcaatctgtccgcattccacttcatctataaactcttttgtaagttttgcttccttactttttggatcgcaatattcaaagcaataggaaatatatgaagcaaaatgatttgtccagtgaaatactaaactatcgggacagaaaggataattaaaaatattactacttcctcccacctagggcaaattcataatcccatctatcagaggtaaaatccgcgaaacatctttgagatgagtgacattaattccaaaataatattgatatcgagttgcatgatattctgtaaaatgaagcgatgtgctatccttctctctgccactttttgcccctaacttgactgcaccatcataaggcgttagcgaaacagccatattcatccctaaagcacccattcgctgattaggagtgctgactgttgttcgtttgttttttctctttgttgttgaagcctcctcttctgtttcagcagactctaataaagcaaacccaaaaatatcatcatcataaaattcttctggatcgaaatattcacttgttaatcgattaatatgttcgtcttcatcccaaactcgattaactaaataaccttgcttttgaagataaaaacgtaacgcccaacgaattgcacttgaacctacaaaagaatgaatcttaccattccaatagcctttttgcaggatagtcttatttcctcgtctaatgtcatgatttaaggacgctaacccataacgagtgaggactgttccgtaaagataataattgggaatattattgtcattcttcttctgactcatcattcacatcttctagtttttgattgtttagtaatgaactatcatccctattagtgggcttatctttgggtttataactggcgatcgctaacaatgaccaaattcttagttcttgccaaggtgtttttttaattagtagtgcaatctcttcttgatgctcattaaaatacttatttaatccccctcttactaaaaagtcggacaaatattcctgaaatgacaattcatcataacaatagtttagctctgcccttaatcgttcaactttcttcttaattggaggatctttccctgactctgctttggcataaattttagcaaagttgcccttcatagcttgctgaaataccttcataaaaataagataccacttgtcttcttcactattctctgccattatgatgaatccttctcggttggaaaataactggttaaataaatatccttttgaatcttctatcaccaatttttcccaaaaattagaccaccaatgaattcctttcactaaattatcagcaatcagtgagcgaatcagattgaccttaataaaaatttgcttatatttaattatctgataattagttttaaagtatttttgcacctgttgataagtgattaaaatattcttatcaattttaatttcttctatactcatcaatgtccgttgacgagaagctttatttgttttttcatataaccaaacttgacaagcttgatagtagcctacttcaggctgaatatcgtctgagctgtaataaagtaatcctgcttctccaaggctactaacatgaaactgtttagtttctaattgctgtaatccccatctcctttgagaagcgtcttcaaaatccttgatttctggaatcaccaccaagtagctatggggtttcctttcttttaagtcttctgatggaatatgaagtaagcaataatgacaaactactggtacaaataataatgctaaagcgtattcaggtttctcttctagttttgtagtattctgcgtccgagcatggcgaacaattccccctaaatacaaccaactggttatttgaatgtaatcatgtctgagttgttgggtatctgcctcgcataacttctctgcaaaggtttgatgtgcgtaccaagttagggatttatattgatactcgacttgtttttcttcaaacgttagttcagtgttaattatctctcctgcttgataaaacttattaagtcgcaggaaaacagcgcatattccctcatgaatatggattttctgccttaaatctattcgatcattgtctaatcctactaaatgaattaaacctgtatcatctaattgaaaagactcattaattaaccaagataaggcgatgaaatcacttccttcccagaataattcaatagtatcagcagtcaaaaaccatgatatatgtactccccgttgacgagataaaggatattgtttttccaatcgctttaaagtcatgtaaagtccggtcattccgacgcggtgcattattgtcgtatccgcagcatggagagatagggaaattttgggttgggtagagactatcatcaggtttcctcttctgacttgctgcgagtcgctgggacaaatattccacacatcatctttcgtttcccgccaattccctgttcttgcaaggttaaggaatcttcaagattgagtttactgatttttacgccaaatcctctaactttaaactgtttcccttctttattgatggttaattgtcttcgttgaggtgttccatcttgtcgggtaagaagttcaatttttccttgtattcctaaattatccatttgccgttgcacagcttcaataaagttagtagagtcttggaaccctttaattatcactaatctggaatagacactttctgaagaaattaacggtttgtagtcgggaatatctaattgataaaaattttgacctatatgaaaggcttgacccgctaaataaggataaattaaaggaatttgttgatgataaatccgaatttttagacgagattgagcagtgagttcaagtaaattgtttctggtcggtattccagcaatcggatgaatcccaacagactttagttcgtgtagtgggggacaaatacgggataaggcagcgtaggtaagataaccgttgtcaagaggaatcggtgcgcctctaagtttaaaggttaagtctaggtaatcttcgctgtttatacttgtggctatcacggataagaatttttataaaatttgatactaatgtttaaaagaattaccaataatttaactacaatagtacattgtaaattaagccgaaagctcaagtcatcaaagtataatttttattaaaaaatttaggttatttaacaaagaaatcatcgtcatggacattgatataatccaaattcaaccctactttgaggatgagctatggagtccagagaaatttccagtgcttgagcgaagtcgtttacatcatttggaaccgattggtatagggactcctatggttgagagtttaaccagttatgtgacacggttagctcattctcatggagtttttgtcaatacattactatcaagaatagttaatcctctcttacagcaaacctttatcaaaaactctaatggtagaggattaaaaccgttttttaaccgttctcatgccttaaatggatatgggataatggctactgattttgttgaggttattaatcaattaacattgcataatcagctagattttttaacattgatacctttttcaaacattttagttataaaaggcttattacgtcctcataaagcttggtgcccaatatgttaccaacacaggaaacaaaataaacaaattatttatgatccattactatggtcactcaatgatgtcagggtttgtttaatacatcaacatactcttgtgcaaaattgtcctcattgtcatagtcaattactttggttaaactggaaatccacgttaggctattgttcacaatgttttcagtggttaggaggatattctaaaacttcagtagttactcaggagagatggatagtagaaaatctgggagaatttcttaccaatgcaaatcagttatcttctgtacttactcaagagcttataccaaaatccttcacccatgtagtgcataaagttagtgaagataatatagctgcttttgctgcaatgcacaaaatccctaaaaatactttctggggttggtattcaggtaaaacttgtccctctttatctgctttactgcaaatttgttataatcttcaagtttctttatctcagttcttgacacaagatttcaatctatcaactacccattgtcaaaatctcaagcttgacacgaaatattctaagaacatacgttcatctcccaaaacactggacttggatcatattgaaaataccctgaccaacattttatttcaagcaagagatccattaccaacaattgcagagatagccaaacaattaaaaattaatagacgagttatttcaagacattttcctttattatcccaccaaattgtcgttaaacgtcgcaattatatgggtatgtgtcatttagctgctattgagcagtgttgtcaagaaattagagaagcaattgtctcactccatcaatcgggagaatatccaaccgagtcccgcgtgtgtgaactgattagtaaccccggctattttcgttataagaaggttcgactattctataagaaaacagttcaatctattttaagtagcttgtgaactttcagtaccaatggagatggttgataattcacattgattttttttcaaaatttttcaggcatgattttgccgttacagttttcaagcatagctttgccgttgcggcaaattcaaactttaaattacagacaaataattagtcactgtacaacaacaaa

SEQ ID NO: 902 - DNA, 32767 bp, Coleofasciculus sp.
  source 1..32767: mol_type = other DNA; note = FACHB-SPT36
ttgacaatataatacataaataacagcgccgcagttcatgcttttaacagccgctgtgtcatttaaagtttgattttgccgtaatttaaagccaggttttgccgccccattctctcaaagcctcataaacccgttgtatgaatattctagcaagatagccttttaaagcctgattttgccgaaatagtatttttaaagtttgatattgccgaaatagacggggcttgttacgatatttttatcgtcaacttgaagcgattttagggaggatagccatgctctccgatggtgaatttcaagcatggtgcgatcgcctgcaactctcacaacaacaaagagattgggttaaccagattcgcacatctcctcccgtccgtaaggtcaaagggagttcaagaaatgttcatggcccttacgctagtaaaaaaatgggcagaacgattcaatttgaatcccacaccgttgaattacctgcgctcattcaattttatgaaaatgatgactcagttttagaatactgggatcaaccgattaaattcactatcaaatgctcacctcaaggaaaacaagctactactatttctcattaccctgatttctttgtaatgagaaagaatcaatgtgggtttgaagaatggaaaacagagaaaaagcttagcaaactaagcaaggaacaggcttatcgttaccaaaacttggaaggaaaatgggtagatatcattgttcaagaatatgtagaaaacttaggatattattacagtcttcgctcagatagtcaaattgattgggtcaaatatcggaatcagaagtatttacaaccctacaagcaaggatatttacatcaacaatacatccttgatgaacaggtagaattccatattaaagagattatcattaataatccgggtattaacctgacaaatctacttaaaaaagcggaaaatgccaccattgacgatattaataccttaattgcgcttgaaaaagtttatgtcgatttaagtgcaatcgccttagtcgaacaagagagagtacacctattccgtgaccaagcgactgccgaagcatacattactgctactcatgattacagtgaacctgtatctaacagtgtgcagatagtcgatctcaaagtgggttcatcatttctgttagatagaaaaagcctgacgattgaccatattggagagagtaaaataattctcagaggagaacaaggaattattcgttggactcatgcagaatttcaacaattagttgagttaggggaaattacttgtcttcaaacaaaagaacagaaaaccttagatgaggagggatggcaacaatactttagagaagccagccctaaagctttagaaattgctaatcagcgatatcaagcaattaaaccgcttttagatggggagtcttatgattctctagactgtaatgtaccagaacgaaccttacgccagtggaaagccaaatatcgcaaagcgaagcaagaatatggagttggtttggtaggtttaattcctcaatataaaggcaatcccactcctcgctattctgatgaagatttagaattcattgataaggttatagaagaacactatgaaacctttaaacaaaagaatgcttggcaaacttatctaatgctaagagataaatgggaggaatcaggactcaactctccaattcctagccataccttttactatgaaagattaaaaaaacgaaactcttatcaacaaactaaaagaaggatgggatctcgcgccgctaatagtcttttggggccttggttgattaaacccaccaccccccgtcatggagatcgccctcttgaaattgttcatattgaccatactcagcttgatgttcaatgtatatgtccctacagtaagaagaacttaggcagaccttgggtaacaggcatgattgatgcttacagtcgccggattttagccttatatctaactttcgatcatccgagttatcggtcatgtatgatggctatccggatctgcgtgcaacggtttgggcgattccctgaatggattgttgtagataacggaaaagagtttcaatctacttattttgaaactttattagctcgatttgaagctagtaaaaaacatcgtcccaaagatgttccgaaatttagttcgattattgaacgttggtttgggtcacaaaatacggaatttatcaataatttaaggggtaatacccaaattatgaagcacgtccgccttgttaagaaagaaaataatccaaaaaatctagcaatttggaatttagaagaattatacgattatttggcttttggctatgcttatggagtttacgatcgggcagaacatccggctttagaaggaatgtctcctcaacaagcctttgaattgggattagctaaaacgggacatcgccctcatcaatatatcaagtatgatgagcaatttaagattttaactttgcccacaaacaataagggaacagccaaagttattccgggtaagggaataaggattaactatcaagattattggtcgaatgaattttacagtgtggaaaaccaatcggttcccgtccgctatgatccccttgattatggtgttgcttatgcctatgttaataatcattgggtaaagtgcttatctaattattatatgaagtttcaaggttattcagaaaaagcggtagagatagcatcaaccgtttgcagaagaaaacaacaaaaatataaccagagccaatatatagggtttaaagagattgttgacttgctgaataatgcagaagatcatgaagaaataatgttgcaaatccgtcaagatcgctcggctaaattagtttataatttaatcgaaggaactcttagtagcgctgttttaaattcagtagatattaaacagccttctgaacctaagactaaagagattgaagaggctattttcgatagggaagaagctgttttacagcctagcctgtctagagaaattaaccttgacaatattcaaccttttgctgatgaggaattatggtgatgactaataatcgtccgttttttctagaaattcttcaacaatcgacggagaataaacttaaatactttaaagatgtgactgttcctcatcgcaatatcaaattgattttagaccagctactcaaaaatgcgatcgaaccggatgatgctttagtatatctggtgtttggagtaacaggcgtaggtaaatctcgcttgaaagcagaatttgagaaacgattacttaaacattttgaagatgaaattatttccaatcctgggagtttaattgtagggggaatcgaggtagatagcgctgaaggagggaagtttaactattctgattactatattcaggtgttggagtctttaaaagaagttttgattgattataaggaaaattatgggattgatttagaaaatgataacgaagataatttaacaggagatcatgaaggaaagaatgctaaggctttgcgccgaacaatgcaaaaagtttttttacaccgtcagttaaaagcttataccctcgatgaagcacagcacttatttgatgtggcagggggaagacaaattaatgttcagatgaactggcttaaatcaattgctaataaaactcaaacagttcatattttatttggaacgtatgagctattaaaatgccaacaagtgaacggtcaggtaggcagaagaagtgaagattattatttacctccctattatctaaataaagtagaagaccaagaagaattttttaagattattaagacgttacagcagcattttcctgtggaaaatgcgccccaattagaaaaaaatggggaatactttatggaatactcgataggatgtgtgggaattctcaaaagttggtgctatcgcgccctcaaaaatgcgttagatgataaagccaaaacagtgagaatgaaagattttaaagcgagggagttatccgcaggaagacgaaataagattaaagaagagttagaagcaggagaaagacttttcgccagtttatataatgatggaaacctcaagaaaactgaagctactgacagttcatcacccaagagaggtggaagggttggggagcgtaaggtaggtagggacttagtaggaatcaatcaagaaggatgagtatttactcagagctttggagtccaaaacctctaaaaatcccccaacggagtcggttattttctcttgaacctgtggcggtgggaactccctacacagaaagtctgagtagctatctgaatcgtttagcgcaagagcattgtttaacctctcagaagctgattatgggagaaattgctccacttatccttaaagatgaggataaatctgagctattggcaaaaaatttgagtcacctattgggaaatagcgatgctaaaccagccatcaacggaatgcgggaaatgacgggaaagttggtagctgtattagaagagttaactatgcgtcagaatttacgctttttgactcttttaagctgcaaagggatgatttatgaccgagggttatttcggaattatcgcgcttggtgtccttgttgttgggaagagtggaagcaggaaaacacaactatctatgaaccattattatggtcatttaaggatgtagaagtttgtttaattcacaaactgcgattaagagaagaatgtcctcattgtggttcgcgtttacctgtaatggctaggctttcacctgcgggattttgttctcgttgttacgagtggttaggacaggaaattaaaggcgaagaagaaatagagaaatatcgagctaatattcaaggaattagcgaattaattgcacttactccccaattaggatataaacctatcccaatcgagttaacccgaaaattacaattaattttgttagtatttgaacaaggaattggaaaggatttgaagttgttgggagatttgcaaggaatcatggaatcgttgaggatagcgtcaacaagaaatcaaagtcaaccttatcatctggtgaagtcaattattcctgtatgtaagaaggcaaaaattaatatagcccagctatttttttctaattataaggagttgggtgaaatattattccgtaatttcaatttagaattcaggttatagggttttttacacgagtgaggtacacaaagattcagtattatcaagctttccagctttgagaatgtacctcatgtaaccgagaaccgctatataataattaactactacaaagactgctagataaatcaaagtttattacttaaaatcctatggcgacaaatatagaaagttctaacaatcaagagttagttggttttatctggagcattgccgacaaactccgaggcccttaccgtccaccccagtaccgccgggtgatgttgcctctgattgtgttgcgtcgtttggatgctgtcttggaaccgactaagaaagctgtccttgaggcgaaggcaaaatatgaggcgatgggtttagagggggatgcttttgagaaagcgatctctaaagtcgcaattggcggtgatcggcaacagcccttgtataaccttagtgaatttacgtttcagaaattattagaggattctgatgggctggcggataatctcagagattatatcaataagttttcgcctctagcacgagatatttttgagaaatttgagtttgataatgaaatccaaaagttagatgaagctaaccgtctttttgaggtcatgaaggcgattaatagtcctgaagttgatttatctcctgcgaaactctctaatctgcgaatgggctatctgttcgaggaactggtgagaaagtttaacgagcaggcgaatgaagaggcgggagatcactttacaccccgcgaagtaattcgactcatggtgaatctggttttctgtgacgagcaggatatttttaaacaagggatttaccggacagtgtatgaccccacagcaggcacagggggaatgctctcagtgtcggaggaatacattaaaaagcaaaatcctgaagcaaatttagggttatttgggcaagagtataatcctgaatcctatgcgatttgctgttctgatttactgattaaagatgaaccgattaacaatcttgtctatggtgacactttggggataaaaaacgcaaaaagtaaaagtaataattttttaccccgtgacggtcatcctgataaacagtttcactatatgtttgctaatccaccttttggtgtggaatggaaaccagaagaggattttattaaagatgagtatgacaatttaggatttaagggacgttttggggctggtatacctcgaattaatgatggttcgctgttgtttctgcaacacatgatatcgaaaatgcacgcttccccagaggcagggggtgatggttctcggattgctattgtgtttaatggttcgcctttgtttacaggggatgcgggtagtggtgagagtaatattcgccgttggattattgaaaatgactggcttgatgcggtaattgctctacctgaccaaatgttttataacacggggatttttacttatatttggctggtgacgaataagaaagcagcgcatcgtcagggaaaagttcagcttgttgatgggacgcaccattttctgaaaatgaaaaagagtctcggtaataagcgcaatgaattatcaccggagcatattgcggaactggtgcgactgtatgggaattttgagcagaatggtttaagtgaggtgaaatcagacgggcagatagaaaagcagatttgctcaaagatttttgataatcgggagttcggatttctcaaaattacagtggagcgcccgttaaggttaaattttcaggcaagtgaggagcgggtagctcggttgtcagagcaaaaggcatttcaggatttggcaacgagtaagaagcgtaaagatgctaaggtgcaacagttagaaatggagatgggtgaaagtctccaaaatcaaattctcgatgctttacggagtctggatggtaatcgcctgtatatgtcccgtgctgaatttatgcgggatttggaacgggtgttaaagaatgcggggctaaagttgaaagagccggtgatcaaggcgattttagcagcgttgggtgaggctgacccagaagcggaaatctgtcgggataagaaggggaatcctgaaccggatagtaatttgcgagatacggaaattgtacctttaccggatgatattacgttgccgttaccgttgggatatgacaaggatgcaagcgcagatgatttgattaatttagtaaaggggcattgtgaggagtatttggaggcggaggtattgcctcatgtgcctgatgcttggattgatttttctaaaacgaaggtggggtatgagattcccttaaatcgtcatttttatgtgtatcagccgccccgtcctctggatgaaattgagaatgatattaagttgttggagtcggaaattatggcgatgttgggggaggtagtgtaatgggtaagtataagggttatgaaaagtataaggattctggtgttgagtgggtggtggagattcctgaacactggaaaatttgcaaactaaaacgaacagtaactatttttggaagaattggatttcgtggttatacaacgcaagatattgttttggagggtgaaggtgcaataacattaagtccatcaaatattttagatggcaaaatcaattacactaatcgaacttatttatcatgggataagtatcatgaatctccagagatacaagtatttgataaagatattctatttgtaaaaacaggctcaaccattggaaaagtggcaattgccgaaaatatgccagaaccaatgaccattaacccacaattagtagttttaaaagaaattaattgttgtccagagtttttagcatatttaatgaatgctgatttttatcaatttcaagttatgggttttcgttttggtggttctactccagcgatgactcaagaaagtcttggacaaacaaaagtaattcttctgccactggacgaacaggaggcgatcgctcaattcctcgattataaaaccaaacaaatagacgacctcatcaccaagaaagaaaccctcattgaaaaactcgacgaaaaacgcaccgccctcataagtcatgctgtcacaaaaggactagatccaagcgtcccgatgaaagattctggtattgagtggttaggtgaaattcctgaacattggtcaatcaacaaacttggacgacttacagaggaaattaatgatattaatcatgaaatgcctgttgctgttgatcaaggtattccatttctctcagcgaaagatttattagatgatggaactttaaattttgaaaaagatattaagaaaatatcagaagaagattttattagattatcgaaaaaaatctgcccgaaacgaaatgatattatttattctagaatcggtgcttgcttaggaaaagctcgaattgttgaagttgatatccaatttcttgtctcctactcatgttgtgttattagacttcgccaagaattagctgaccccagattttttaaatattttttagactctgaattgatattaagcgaagcaagacttagaactcaaggcataggagttcctgatttaggcttaaagcaaatttcaaaatttactataagtgttcctcctatactagaacagatagaaatagccgaatatttgaatagaaaaacggctcaaataaagcagcaaaaaagcaaagttgaaaaagccattgaactattaaaagaatatcgcacctccctaatcaccaacgccgtcacaggtaaaatagatgtacgccaagtttctatcccctaaccccagaacccaccatgactcaaaaaacctatcgactccctctaacctttgagcaaattcttaatcttgtcctacaacttccaggacaagaacaagaacaactcattcaagaaataaagaaaaactatcccaaaaataaagatgaagatttacttagtgtttttgacagaatcggcagaaatgctcaagccaaaggactaaccgaagaaatgctagaagaattactcgccgatgaatcataaagtaattgtcattgacacaaatgttttacttagcgctgccctaagtccagatggaacagcccgtaaagccttagataaagcctataaagaattcaaaattgctcaaagcaatgaaacttatcaagaattaaacacacgaatttacaaacggataaatatatcttagataaagaccgacaagattttttggatgtagttaaaaaatacagtcattttatagaaataaaatctcaaataaacacctgtagagatccaggcaacaacaaatttttagaagttgctaaagattccaatgtagaattcttaatcacaggagatcaagaccttttatcactcaagactttagccgaatatcaaaaccagattactactcccagagactttctagccattgattaattccacgcttatattggaatatatttatacttcatgaagtatgcacacggaagagaaatttgaggacatcatcgaacgggaactcctccaactcagtggctaccaccaaggcaacgcagacggctacgaccaagaaagcgcccttttccccacggaaatcatcaacttcatccaaaccacccagcccacacaatggaaacgtctagccaacaacagcgatgcccagaaaatcgttatagatagtctcaccaaagaactcaaaagccgaggaatgcttgatgtcctccggaatggattcaaatgctatggtaaaaccctgcgagtcgcctatttccagccgaacacaggcatgaaccccgaaaccttggcactctacgaaaaaaatcgcctcaccatcactcgccaagtcaccatcaaaactggacgtattcccgatattctcctcagtctcaacggcctacccattgcaactatcgaactcaaaaacccccttaccgagcaaacttaccaaaacgccatctaccaatacagaaccgagagagatcccaaagacccgctatttgcatttaaacaacggtgcttagtccatttcgccgtagacaccgaagaagtttggatgaccaccaaactggctggagaaagtacccatttcctacccttcaataaaggtaataatcacggtgcaggcaacccagtgggagacaatcaagaatatcgcaccagttacttttggctagaagtcttacaaaaagatagccttttggacatcttggcgcgttttctccacatcgaaaccaaagaaaccaaaattaccaccgccactggcgttaattaccagaaaaaagaaaccctcattttcccccgctaccatcaactcgatgtcgtcggtaaactcattgcccataccaaacaacacaaagccggacataattatttaattcagcattcggcaggatctggaaaatcaaactctattgcttggttagcccatcgcctagccaacctccatgacaaccaagatgaaaaaatctttcataccgttgtcgtcatcacagaccgcacggtactggatcaacaactgcaaaacactatctatcagtttgatcataaagccggagttgtccagaaaattgacgaaaatacccaacaactggtcacagccctcagcgacggtgtacccataatcatttccaccgtccagaaattccccttcattactaaagccatcgagactttagcgaaaaaaggtaaaaccatagacattaccaccaaagataaacgctttgccgtcatcgttgatgaagcccacggctcccaaaccggagaaaccgccacagaactccgcaaaatcctaaataaagatggtatcgaatcagccattgccgcccaacttcttgaagatgatcttgaggaagatgacctaagtgatgaagccaaaaaacaattactaaaagaacaaatcagccgcactaaacaaccaaacctcagctatttcgcctttaccgctacccccaagtacaaaacccaactcgtattcgatgaacccggagagaacggcgaagtcctcttccatctctacactatgcgccaagcgattgaagaaggctatattaaagacgttttggcaaattatacctgctacgaacgctattacgaactcgtccgcacctccgaagataaccctgacttaccccgtcgccaagcagcaaagcagatcgcccgattcgttgaactccatccccacaatatcgcccaaaaagtagaagtcatcattgaacatttccgtaatcatacccttcacaaaattgggggtagagccaaagcaatggttgtcaccagttcccgtgaacacgccattaaatacaaactcgccttcgataaatacattaaagaaaaaggctatagcgatattaaatccctcgttgccttttctggttctattacccttgatgagttccccggagaaacatttactgaagtcaacatgaatggcggcatcaaaacttcagaaattcctgataaatttgccagcgatgcctatcaagtgcttcttgtcgccaacaaattccaaaccggatttgatcaaccatttctccatactatgtttgttgataaacgactcgatggagtccaagccgtccagaccctatctcgcctcaaccgtaccaccacaggtaaagaagatactttcgttttagattttgtcaataaacccgaagacatctacaaagcttttaaaccctactacgaagaaacacccgttggagaaaccgcagatccacagcaattaaatgacctgtcttaccagctttatgaatggcaactatttagtcaagacgatgtaaaccagtggtgtgaaatttggtttcgcccaaaaacctctctcaccggaaacgaacacaaaaaattaaatacattactagacccaattattgaaaattataaagccttccaagacccagagaaagaacaatttagaagccaacttaccagcttccgcaatctctacctattccttgcccagattatcccttaccaagattcagaactcgaaaagctttatgcctatggacgtttcctactaaaaaaattaccccgtagtccccaatctccaacaattgatttatctggggatatagaaataaaattttatcgcttggaaaaaatcagcgaggggaaaattgatttaaccgaaggtaaagcagaaccattacgaggtgctaccgccgtcggaactcgccagccagataaagaagtccccttatcccagctaattgacacccttaacggacgttttggtactaactttactccagccgaccaactctttttcgagcaaatcactgaaacggctatcgctaatgaatccatcaaacaagcggctcaagtcaatacaaaagaaaactttgccccagttctagacaagcatctggaaaatctctttatcgaacgcatggacggtaaccaagaaatctttatgcaagtgatgaataacgaagaacttaaaacaattgtttttgaaaatctactgtctagtatttatgaaaaaattatacagaaaaattcataattaaccttgtatcaggggcagagtgcgggggagtttttgatgccgcctgagctgggttagttgatggcggaaattattgaccctgtgtcctacactactcgaccagtcgtgccagcatctcgtgcgggttcccgtaccccttgccaacgtcggatacccaatcattaacttgctgctggacttcttggagcgtgtaatcagccatcgtgctgcaacagcgtaaaaaatttctggtggtttcactttacagcacgggagtgggaactctaagtagtaggttagcgttgaaacattcccaagcaaagtagacgaagggggtacgggttgcgatttgacctgaatctgcggtctgtggttcgccagcagctacgagatgtaactaataagaattctgtctttttgaaggttaatcaagcatgattgctgtcgaacatttacttgagaatacaccaggcactattacgctcggagaatttcgaccgagcgtaataatgccttccgcaaccctacgaatcacgaacaagcgcttttggttggactaacgccaacattgccgggtggcaaagtgtccaatacagcgacggggtggaatcgaaatgaggttggtgtttggggcggtaagcaaccattcctgatgagttgagttcggttttgctaaccaactttcgtagagctatgccaagtcggtacggcaaacctatcagagaattaatcgaaacccgtatagctgtgagtgaagttgcatcaaacgttacaagcttgaggtcagtatatggcagggatagggttgggtgagggtgaagcctggtatcaaagcgaacgactcacgacacgattgaagaacttgattcgggattatccagaaggcgttggcattattaaggagctaattcaaaatgctgatgacgctggagcaacccgtgtagaaatcattttcgattggcgcactcacagctttgaacagctccccgatcctcgaatggaagctttgatgggagcctctatgctggtctacaacgactccaaattcacggacgaagattttagaaatatccaaagattgggtgatagcggcaagcgagaaactctttggaagacgggtcggtttggggtaggctttaattcggtttaccacgtcaccgatcaccccagctttatttctggcgatcgcatcgtcttttttgaccctcatgcgtctgcaattcgagatgcaacacgagaaaaaccgggacatagttggcgatttgcagaggaaggctggtgggattattgtcccgacttcatgaaggtctacgaaccaggcgggctacaagcagacataacccacttcgacggaacgctctttcgtctgcctttacgaactgttactcaggctcaggagagcgaaattcggaatgagccgttcagtcgagagaacgtgcaacaactgctggcagaatttgtcaaagccggagaggagatgctgcttttcctcaagtcagttctcacggttcgggtttgtgaaattgacaatgacggcagcaagcacgatttgcttgctattactacccaaaacgataaagcagtcacgattgagcggagaaagctgcttacgccattgcagaagggcgcagatactctgttgacactttgccaaggtgcttcaaatcttcttcccgcagtctcttatcagcatacaatcgaggttgccactcccgaaaatcaaaccatttcaacttggcgcgttaccagcctaatgcgtgcggaaggtgagttgctcagcttaatgaaggaaatggcggcacaaggggagaaggctgtaccttgggcaggagccgctgctcttatttctagaactggcaatgcccaacaaaaaacctttgtgggtcgggcatactgctttctgccgcttccccaggaaacgggacttcctgttcacatcaacggcttttttgatttggactcgtctcggcgcgaactgaccagtgatacgctaacgggcagggacaaaaagcgggtgctatggaaccaactgctagtgcgccatgtgctatcccatgcttacgctaacttaatcgtgagcttggtagaggatgttggagaaacagaaccagaacggttttaccaattctttccaactaaaactccaactaaggctctggaaaagttgccaacctacgtcatcaaactactccaagacaaaccagtcattcgctcggagatcgagcctctcacccctgttattcagcagaatgatgagtgccaagctggtaaaactcactgggttacacctcaaaccatcaagattcttcctagaaagtgggaaagcttactcgatccgttgcggttagatggtatagatttgcccagtccacctctgccctccgaactagaagatgcattttcgagcgccaatactcctcttaccgtttttcagccaatcgatttgcgattgcgcctactaacgaaagaacctttgggagtgcctgtggcaaaggctcccaaagcttgccttcgcaagcgagaatgggtgacgaacttgttacgctattgccttgatgatgactgtcgggacgtgaggggtttgccattagcaattttggcaaatgggacattgcaaacctttgggtacaatccttcgggattcatctacatcgtgaattcgcagcgtgagatcctcttggatcaaatctttgctagccgtcctgactggtttttagacgaagactttgctgatcgggtgaggaagattagcgaatgccaaggtaaaggcatttccatacttacttcagaagaggtggcgaaacggctaaaggatttaattgttttgggcgacaacattgcggtcgaatgggaaccggatggagaacagattcctaactcaagctggctgacgcaggtctacaactttttttcagatgtaaagaatttgccgaccaatgaaattaaggaagttccgctagttccttgtaacgatggcttgttatacataggaggaattgcgaaaacacctttgtggtacggctccagcacatccagagaaatgttggatatgctgaaatactttgagattccgctggtcgaggctcaggaaccactacagagagcgatctctatgtttcgcagtcgccatcctaataaactaatttggcggctcaccgttcctgacttgatcgacacattatatgctacgggtgagttgcctgcttacaatccagattattacaagggattagttagcttcctagctgatcgaaactggatacagggggaagggaaaaacgatgagccacgcaaggaaaagctgcgccagttgcaaatttatcccactatagaaggtcagccaacagagttgaacaatgtctacgcactcggtggctatgttcctcctaaagttgccggttcgctgaagctgctctgtttgggagctaatgagaatagccaggagtggaaagcgttttacgatttcttagggattcctgttttggatcatgcgacgatgatccaacgtttgctagcggactacactaatctcaagccaagccagcaattggaagccctggagtggatacgtgaccatttaagaattgcccagacggaactagaaaagcagagtcaaagtgttgatctgaaaaagcaagtgcgagaaacacctctcattcattgtatagatggtcaactaagagcgataagtgctgtttacaatcccaaaacatataacgaagtgcgcctagtgctgggagagcgtgcccatatgcccgacatggcaatctacaaaaacgcagagcattggcttgacttctttcgagagttgaggatgttgaaaacggctagtgcaaatgacctattggcgtatgtagatgagcaaattcagcaggcaaagaacggggtcacggatgagatcgccaagcatttgacagatgtatttagccaccttgaaaaacattgggagcgactggaaaaagaaaaggtgtctactggtaaaacgctggctgaagctttgaagacgagggcttggctccctgttgagcgagagccggagaaacttaagcgattcccagcattcactgttccgcagaacaggctgtatcgtagtgatgatgtttgctttagtccctatgggcttcttgtagctagccaaaagcctttgtttgtcgttagcaaactgccgaaaaatgagtttcagcaagctctaggcttccgttttcccaaccgcgaagacgtggtgaaccactttaaggctttgatacaactttgggatggagaggcaactccatcatttgacgatgaggcatttcagcgatcgctccaatacatctacaactatttcaagactgagtttcttagcagtcgagcgacggatgcagaccgtcaatggttgcgaaaccagttgcaaggctacaaatgtttgtggaactatggggagttttggaagccggaacacacatttcaggtcaacgttcctttctttggtaaacgtcggcaaaaaattacaccttcttcgcgcattcgggaggtatacgagcttttggggcaaaaacggcagcccggaatcgacgactaccttgcttttttagcagagctagcgaaagagtgcagaagtgaacctttagatgctgataatgcgaagtgtgcctacgaggttttgcagcttctaacgagagatttggaactagaacaacgttctgctgccgattacgatttgctcttgctgacagacgataacctgctgttgccacccaaccaaattcttatccccgatgcaccctggcgactaaacgctattgctgatcgtaatcaggttaaaatcttgcaccctgaagtgccccacagtttagcgagtaccgcaggtagtcgatcgctgctgagcgatgtgattgagaagcctacaaacattgacttaacaaacgaccagaatgcaaacaggctttgtcagaagtggcagattctgctgcgttcgccagaatttctcagaggattagagcggctgattatagaccagtacggattagaagcaaaagtggagttgggttggctagcaagggcaggtgttgaagcagcggcgacgattagcaccaaattgctactggacgatcgttgtatcgcgtcaggtctgcaaggaagctattacttcgagccgaacaagtgtgtgttctacctcagctatgaaggcgaagaattaatgcgccaccaccagactgagagcctcaaccatcagttaggcagctttaagctgaatgatacggctcgcttattgacaatgctcaacagcaagccatctgagattgaatacctgcttgatcggctcaaagttaaggcactcaagcgattagcccttgcgaccgtagtatcgtttgccgaaatggatggagatgaggttgaccaaatttttgatccccatttgctggatgagtttgaggtggacaacgtgggtgatggtaagacgaataatagtaacgaggaaaagccgtctagtttcttaccagttacaaaagctaatgacagtatcacagggcaagccatcgccaagcctaactctgctccacctacaaccaatggcttaacaacggcctcaccctctatctctcctactcctgttcagcctattgccaatccaattattaagcctgcaaaaccgagcgctctagtaaaacaggcaacgaatattttaaatgtgaaatctgctgctcagtctgcgaacgaaaatgatgtggagaaaacgaatcacaagccaattttggtttcttctacttatagaagaaaccatgtttttcgagtaggactagcaggtggtttgaaacgagcaagttactccggcaatcggagatcgcaagccagagctgcatacccaagccaacaatatcgcaacggtgtccgagttcgttctggattggaagttaatcctaacaaaagtgtagaaacaagattgtcagaagtcgaggcgaaaaagattgaccgggctgggatggcgcaagtcatggagtatgagcgtcggcatgggcgcgaacctaaagatatgaatgagattcactcaaatcatcctggctacgatattgagtcgagagatgtgcgatcaggtgaagttcgctacatcgaggtgaagtcactacgggggttatgggacagacgaggagtctgcatatctctaactcagtttgaaaagggtaatgagaagcaggataagttctggctatacgtggttgagcaggccgaaatggacaaagcaaaggtgactctgattcagaacccggttggattggtgggtgagttttactacgacgatagctggcggcaattagcagatgatgaagcaagtgaggtgggctaatgcaacttttgttttcatggagaagaaagcgcgatcgcgctttttgctcggtgaactcggtatgagtcaataaagtgggcgattacgaaagccttttttaatctccctgtcaatcgaatgacaaatgtagcaagaagcgttctttgtaacgcaagggcagcgagttttatgccaagcggctgatgagcgcttttcgtgagcgaagaaggttttggtttgtgttgttaaaatccagctgactggattttaacaacggtcagcctccttagtagaatgggcagtctttgtttaatttggtaagatattcttaccaacggtaagaaacggaaccgtgccatgactccagaggatgtgaaagtcaagcttatagaagtactccaagaaatccagagtgacagcggctatgaagaaacaccaatctcaggaataacctgtcccatgactgacctgaaagggtttgatagcctccttggtgttgaggcgattaatatgctagccgacaagctcgacgtggaaattcccagcagctacattcacaaaatatgtctctcgcaggacggcaagcagtggctcacccttgacgagtctgttgctgtagtctgtgagattgtcaacagaggagggacttaggtatgagtcacatagaagagaagaggtcaattattgcagctcgcttgcgtgaagctcgcaagatggcggggctttcccaagctcaggtagctaagatgcttagtcttcatcgcccttcaattacggaagcggaagctgggaatagaaaggtttctgctgatgagatcacgaagctagccgaaatttatgacgtaagtgtgtcatggctccttggggagggtgcagacaagcttgatatccatgacgacaagattcagcttgcagccagagaactccgaaagcttaagccagatgacctggatcgacttttaacaatacttgcctcaatgcatagagggggagaagtactttgaggaatcagactttgagaaatcagagacaggttttggcacaacaagcccagcagaaagcaatcgatgtgcggaggaaagccggttttgacaacaaaagcccactctgcatttatagcttgtgcgacaagctcaatgtgagggtcaagtttgttgacatcagtatggaaggtatctatctccgagaagcagagccggtaattttactttccgcattacgtcctctccccagacgtatctttacctgtgctcacgaacttggtcatcatgtctttggacatggttcgactattgatgaactgctaggagaatcagaaagcgctcaggcttttcaaccagaggagtttttagctaactcatttgctggattcttgctcatgccaattttagccgtgcggaaagcattcgtttcgcgagggtgggatactgcttcggcaacgccagaacaggtttttacagttgcctgtactttcggcgttgggtacgaaaccctaattactcacatggcttatgctcttaagatgatctcctcttcaagggctagtacgcttctcaaaaccaagcccaaggctatccgtgaaaaggtgcttgggcgtccatctactgacccgttgattatcgccgatgcacactggtcaatgccaacaattgatgcagaagttggaagtctgcttttgcttccaagcggagcagaagcagtaaatgacactatcagttttgaagaaaatcacccgaagggacacctttttaaagctaaccgtcccggtcttattcaggtttattgccgtgacaccggatgggctgtctttgttcgtgtctcgcgctctcagtttattggtctaagtcaataccgacattttgaggaggtggaaaatgagtaaaagtttaccttttttgattgatgaagaaaacctttcccatgcttgggcaaaagcatttttgcacattattgacaatccaggtaagggaatttcgcctcttgtggtgagcatcacaggttttaatgatggtatttcaaatgaagatatggatattcgacaatcgcttgataaatgtcttgctgataatgacgagcaaaaaatccacacggttgccaatacgattttccctgattccctttggagacggtctaagtaccagcgtcatgaactgtttgaacgatatctcaagtttcttcccagggctaaagcaataaaacattgtaaacctaaaaataggcgcggtctttactttgagagacttattgcctttggttctgatgagcaaactaaagtcaaccaacttgaatacattattgatcggtaccaggcacaaccaacagccaggaaaagcatgtttcaggcatcaatttttgatcctagagaagaccatattcctaacccttatatccccttcccctgtctacaacacgtcagctttgttccccagggaaaaacgctgacgttgaacgctttttatgcaacacagcagctactcaataaagcctacggtaattacttggggctatgcaggttgggaaattttatgtctcatgaaatgggtctaacgtttagccgcatgaactgctttgtcggtgtagctaagctagaacatattggcaaggaaaagaatatttctaagacatcacatattcttactccaaccatacaagtatgccgaaaagtgttactctcaaggacagagtaacaagcaatggatggaacgtataatgccaaccaaacaaccaacgagaggaaaatttaaaactactcaaaaagacacatctcttgacgaacaactaagtcttgacttaggcgaatctagtagacctaaaatctctgacagcatagatgttgccgcatattctcaccttctgcctgccaagcctaccgttgtgtttgatacgtactggcgatttgcagcagaaaggcaaaaagtatttttcaagaaattgcgccgagaactgatgccttggactgaagatccaattatttctaccttcaaatttaccaatgcctaccgagcatcagatcgtacaagccaatatctgatccgtcatgttatctaccgagaagatctcccttccacagcggaggaagtgtttttcagaattattctgtttaaaattttcaacaaaatcgaaacttggcggcttttggaaagtaggctaggcaatattatctacgcagaatattcttttaagcgctacgaagaaattcttgccgaagctatagaacaaggtcaacgcatttattcagcggcatacattatgccctcaggaggaaaagggcttagacatacaaaaaagcaccacactcatctcaagttgattgagatgatgatggctgatgaactaccaaagaagctaaacgatgcaccaaatatgcaccgaggatttgatctcttgcgcgaataccccactattggtgactttcttgcctaccagttcattacggatgttaattacagcgaaatcacgaacttcagcgaaatgagtttcgtggttcctgggccaggtgcacttgatggtattcggaaatgttttgcagatattggtggtcttaatgagccagaaatcattaaactgatggcagaaaaccaagaatatgagtttgagcgtttaggtcttgattttcagtctctctttggacgaccgttgcagttaatcgactgtcaaaatctattttgtgaggttgataaatatgcccgaatgaaacacccagaaatcagcggaatatcaggtcgaactcgtataaaacaaaagtattcaggtaatggagaaccaatagattattggtatccgcccaagtggggaattaaccaagcgagcaaagagtcaagaaagactctaactacgaaatatttaaaggctgaatagaaaagcaaggagcctgaataatggatttttgcaagtaccaagagctagcattaaaaacggaacaggctactgctgtgcctggtgcagaagtaattgtagctctacttggtctagccagtgaagcaggtgaacttcttggcgagtacaaaaagtatctccgcgatggagcagctcataggcttttccaagaacgggttgcagaagaacttggcgatttactctggtatattgccaacgtagcgagaaagtttgatcttgatttgaattttattgcagaaaggaatctcgaaaaatgccgtaatctttgggcagagaaggagacagaaccaacaggtgttaaaaatatgggaaactcatttgacagtgactttcccgaacacgaacgcttacctcgaaagttcgaggtcgaaatcactgaagtattccaagataattccataaaaatgaaggcatttgtcaacggacaacagattggaaatgacctcactgataactcctatgccaacgatggctaccgcttccacgatgttttccacctagcctatgctggagttttaggttggtctccagtcactcgtcaactacttggtggatgtaaacgcaaaagcaatcttaaagtggatgaagttgaagacggcggtcgtgccaaggcaattgaggaaggcatatcagcactcgttttcagctatgccaagaatcatgctttcttggaaggggtttcagcgattgactaccatttgctcagaaccatcaaggaaatgacctcccacttagaagttgcccaatgttcacttcgtgattgggcgaaggcgatcctcatgggctatgaaatatggcggcaggtagataaaaatcgaggaggaatagtcgttgttgaccttgatgcacgttccataacatatcaagcgtcatatagctctccttaggctgaactcggttgacaccagacttagcagcactaataagctctgcatctgtgaagcaacgtgtctcaaagtgaacctctgttcgttctaaaagctttttaagggggctgatttcaacgatatcgatgtcataaccaacaatattcatgtcatagagaattgaggaaatagttagcaattttatctgttaggggcttggcaattgatacggcgattgcgagtccaatagtccagatgatggcttgcttaatagaatagctttctaattttttctccatatcgtccagacgttttatgagagaaggaagagacgatactgcatctggagaattcattagctcggtgtcgattgaatcgtaaccgagctttgtacggggacgctcatcaacggcatctaagtctgcgaaccatatggaaaagagtcgttgaccgcactccacatgaaagtttaacggtcctgcgttgtacaccgcaaaaatcaaatgtcctttgtaacctggatcaacatggaatccagagacgttgatcagtccttttgcttttgccctgaacttcatcgtgatgaatgcaattgcgtggctgggaacggcgattttctcagaagttatcagaaacgcaaattgccctggtggaatagcaacggtgtccctttcattgagaaaaattttttttcggtctttctgcggcgtatcaggaagagctgaaatataaacttctttacctaaagacaactcataggatgccgactcaattcgatcctcataaaatggttcaattaaataaggacgataagatttcaaagattgcgatgaccaaaaactcattcttttccctaatcaagccgtctagcagttctgtaatttataactgactttttcctcgattgtcatcgtatatcatcaaagtctcaaaattaacgtagaggttcagtgactgcacctttcgcacgttcccgttcgtggcatccagagcggctgtaatggcgctctggtggctccgatggggtaacccttttggtgattcctgccgcagctcagggttgcatgataatgtcaaattcaccaggcttcttggacttatccccaaacaaggctgtctatgtctctttggtaaacggtcgaggtacgatttaaatagatttttgggaaaagccttagataacgccctctctggcatctgttctgatgtagatagttgccgtgtctggcataaggccagcacacgattggttgacttccaaagttttaaggaacgcgctaaggcagtccctgcatagtttttatttgaggggcgatgacgtgacaactgctacacactcccctgaagcttttcgacattcaaacagactccacccagccagttcatcctgtgcttgggaattagcttgcgcccaagcatctaaataatcaagaactgctctctggttcattctctacctcaacaccgtagtcagtgaacagacgagccatagagatgcccagcgcattagctagcttctcaacgttctccagagagggatttcgcccacctctctcaatatccgaaatgtaggtttgatgaagctcagctcgttcggcaagttcctcttgagacaaatccaattctcgccgacgccgcctgatggctttcccaaagcgatggttaatctctgattgtttttttcgactcactgcacgattttcaaggagtgcaggttatgagtccatagacaatgagtattattttatagactttaagttataaaataaatgcagccagttcttgaggaacttatctatgcctaacatcccttcccaaatcccacccttcgccgtaccagaggacattcccgaaatcctacctgagcaacagtttcagctcggtgattcagtacgctggcgtcaagttcctcatccagactttggtcgcatcctcggcgttatctacacccactcctccagttgtattgctactggactgcattacctagttttactcgacgagcaaagccccccaccatatcaccagctacgacttcgcttttgagcaagacatcgaacggctcaatcagtcatctgtagtttgaatcagaggtcatcatgtcttctcaaccgacacgtcaacaagttctagagctgcacaatcagatgtttatctccccggaagacttcagttttcgctggggaattgggtatgaggaattagcagaaatttgcgccatctccaaatccaccacttaccactggctaggcggacaagctagccgtcgagaagcgggtcttccataccaacgaatcatggcgatggctgattttctcctcaccaatgccgaacgagttcagccacttttggaacgctggcacacaaagcagtaatccgacaaatggttatggctttgcaaattgacaaaactttcttgaccgtctgaaaaaccagggagtacggtgcagtcagtgtaatctagacaccgattgttttatgacctttttctccacccgtaacggcaatcaaccttcctccactatcgagattattggcgaccatattgtgattcgcgacttagaaatccgttacccagaggcagctaactacttgagacaattgccccagtcccaacaagaatctactctcctgagttgtgtggaaatgggttttgcctgcatccaagtcgctcatgcccgtcaggatacagcctttattgagcaacggatgcaagccctactttctgaattccaaacagccgtaagccgcattgtccagtcttttgagcaggagttggtcagtcaaattggtacagaaaatggtcaagttttggcaccgctcaaaggacaaattaatcaaaccgcagcagtgcttaccgctcaagtggatggcgtccgaactctgctagcacgggatattgacccgcataaggaaacttccgttattggcagcgttctcaaaaccctcaccaaccttctcaaccccaaattatcagattccatccaggggtcgtttaaggcagcactagcgaatgttacagcagacaacggaactctagccaaagctgtaaagagtgtggtcagtgaagcagtaaagcccttagcgtcggaagtagacaagctccgccaggaaattcgagacaaacaggtaacgcaagcagcacttgagcaaacaacagctaagggtgctgcctatgaagaaatagttttggtagaactacaggattggtcaaagatttgtggtgctgagattcaccacgtcgccaaagaaaatgagccaggtgacatcctcattaagctcactcccaactcagtagcggcaacggagatttcaatcatcattgaggcaagaaaccgaccttcccaaccttggggtcgcaaaatgatttcccagcgcttgaccaaagcactggcaaagtatgaagcgaatgctggaattttcttgagtcattctcgtcagggatttgcacgggaaattggggaatggacacaaggaacctgtgaatacggattgtgggttgccactactcatgagttgctcacggttgcccttcagtttctaattgtgcgccagcaattagcgactcaacaagcctttaacactaagcttgactatggtgttattgaagctcagattcagcgcattcaatcttccctaaattacattagccaaattaactctcacctgacgtacttacaagaaaacacagaagggattcgcacaaaagccaaggtgatgaaagcagaaattcagagtgcccttggctcaatcagtgaaagtcttcgtgttgtttctcgtgaaacatgagggtacaaccagccgcaattatcttaacgccagccgaaaaaacgtgcctgagcctaataggtttgagctggtgtcaaatcgcgtgttgagaaattgtatgaaattgagatgaaatagaagtggaatgtaacacaagttcaggcgaacgggaaaaagttgatgagttgaccgcaaaagaaattgaggaacccaaggttcgagtacactgcttattccaaagaaatctggacttgcactgagtaccctaaccggataaatattttgatatgctctcagatgctttatgtgaacttttgctgttgaagttttgatttaaagttgctgagcaacgtctatagacatgaagccacgaatcactcggaggaggttaagataataacagcgccgcagttctgagcaacgcctaacggcataaagccacgaatcacaagtgaaaagagagtttatcgatcctctgcaaccgtatctgagcaacgcctaacggcataaagccacgaatcactgcctttacttacaatctgccaaaagcacttccagctctgagcaacgcctaacggcataaagccacgaatcacagcaaaggtgaaaacccttgactgataaaggctcatttacaatcttacaagcaccttcgggatagagaacccaaaaacacaaaacttacaaaatatcctttaccttcagcccctcaaacccagtccctataaacttttccagaaatagcaagcagctttctccttgcctaaattgccgtacccctcaccctgtaaccctttgagccatttttttactctaaattcccttgaacatcagagatacttgtcaaatcggagattgaatcatcgtccacgccaaatcaggaggcgatgagcttgagatttcctccatccgatacctcaaaaatcgggtatttcttgaccctacatggtcaacccaatagggtaaggttaaactgcctcgattatccctaatcgcccactgtctgactccctctagataatcttcccttgcaagtttgatcgttttaatcaactggtcactttctcccaaaaacaaacaaccaaaccgtcttactagctcaggatggtcaaacgctaactgtatcctctcccttaaacttggttgtatcttctccccgtcagaacgaacccaaatcaaacacttcagattagacacaatttcttgataacagggaataacattctctggatggctaaaatcagcattcttaaaccgtctcatttgacgcaaaattcgtgactttttgggggtagataacatcgcgatcgccaattctaccccacagtggcgatagacatccgtttcccctaccaaagataacaacatcccatacactgtcgctggaggagggacaggatagctttttcccatttcccttgcatgggactcccgaaaagtcgcaaatggaacatccaaatagagaattaatggtgcaatcattttgattcttataatcctaaatctcttttaatcactgctttcaaagcttcaatcagttcattccgatttcgataaatatgcgcgttcttaaaaggagaattatcaaaattatccaattgctgtaactccttaacgattgttcccccaacccacaattgattagggtcaatctgaccacattccacttcatctataaactcttctgtaagttttgcttccttactcttaggatcgcaatattcaaagcagtaggaaatatatgaagcaaaattatttgtccattgaaatactaaactatcggggcagaaaggataattaaaagtattactactccctcctactttaggcaaattcataattccatctatcagaggtaaaatccgcgaaaaatctttgagatgagtggcattaattccaaaataatattgatatcgagtggcatgatattctgtaaagtgaagcgatgtgctatccttttctctaccactttttgcccctaacttgactgcaccatcataaggcgtgagcgaaacagccatattcatccctaaagcacccattcgctgattaggactgctcacttttttttgtttctttcttctctttgttgttgaagtatcctcctctgtttcagcagactctaataaagcaaacccaaaaatatcatcatcataatattgtcctggatcaaaatcttcactttttaatcgattaatattttcgtcctcatcccaaacccgattaactaaataaccttgcttttgaagataaaaacgtaacgcccaccgaatcgcacttgaacctacaaaagaatgaatattaccattccaatagcctttttgcaaagtagtcttatttcctcgtctaatgtcatgatttaaggatgctaaaccataacgagtcaggattgttccgtaaagataataattggggatattattgttattcttcttctgactcatcattcatttctcctagtttttgattgtttggaaatgaactatcatccccttttgcgggtttatctttaggttgataactggcaatcgctaacaatgaccaaatttttagtttttgccaaggtgaatttttaattagtagtaaaatctcttcttgctgctcattaaaatacttatttattccccctcttactaaaaagtcggacaaatattcctgaaacgacaattcattataacaatagtttatctctgcccttaatcgttcaactttcttcttaattggagacttttttccttcctctgttttggcataaattttagcaaaattgcccttcatagcttgctgaaataccttaacaaaaataagatactgcttatcttcttcactcttttctgccattattgtgaatccttctcgattgaaaaataactggttaaataaatatccttttgaatcctccatcaccaatttttcccaaaagttagaccaccaatggattccttttactaaattatcagcaattagggagcgaatcaaattcaccttaataaaaatttgcttaggtttaatcttctgataattggtttgaaagtatttttgaacctgttgataagtgattaaagtattccgatcaattttaatttcttctatactcattaatgtcctttgacgagaagtttgattcattttttcatataaccaaacttgacaagcttgatagtagtcgccttcaggctgaatatcgtctaagctgtaataaagtaatcctgcttcaccaaggctaccaacatgaaactgtttagtttctaattgctgtaattgccatcttctttgagaagcatcttcaaaatccttgatttctggaatcaccactaggtagcaatggggtttcttttccttcaagtcttctgatggaatatgaagtaagcaataatgacaaactactggtacaaataataatgctaaggcgtattcaggtttctcttccagttttgtagtatcctttgtcctagcatggcggacaattccccctaaatacaaccaactggttatttgaacataatcctgtctaagttgttgggtatctacctcacataacttctctgcaaaactttgatgtgcgtaccaaattagagatttgtattgatactcaacttttttttcttcaacctttagttcagtgttaactatcgctcccgcttgataaaactgattatgacgcaggaaaacagcgcatattccctcatgaatatggatcttctgccttaaatttattccatcattgtctaatcctgttaaatgaattaaacctgtatcatctaattgaaaagactccttaattaaccaagatagggcgacaaaatcacttccttgccagaataattcaatcgtatcagcagtcaaaaaccatgatatatgtcctccgcgttgatgaaatgagggatattgcttttctaatcgctttaaagtcatgtaaagtcccgtcattccagcgcggtgcattattgtcgtatccgcagcatcgagagatagggaaattttgggttgggtagtaaccacgattaggtttcctcttcttccttgctgcgagtcgctggaacaaatattccacacatcatctttcgtttcccgccaatgccctgttcttgcaacgttaaggaatcttctgagttgagttcgctgatttttacgccaaatcctctaactttaaactgtttttcttctttattgatggttaattgccttcgttgaggtgttccatcttgtcgggtaagaagttcaattttcccttgtattcctaaactatccagttgccgttgaacagcttcaataaagttagtagggtcttgaaaccctttaattaacactaatctggaataaacactttctgaagaaattaacggtttatagtcaggaatatctagttgataaaaatgttgacctagttgaaaagcttgaccagctaaataaggataaattaaaggaatttgttgatgatgaatccgaatttttagacgagattgagcagtgagttcaaggaagttgttgctggtcggtattccggcaatcggatgaattccaatagagtctagttcatgaaggggaggacaaatacgggacaaagcagaataaataggataaccattatcaagagggatgggtgagcctcttagtttaaacgttaggtctaaatattcttcgctgttaatgaagttggctgtcatagatatttcattaaaataattaatgatgaatattgtataatttactaatgttttaagtattttagtagataatgatttattttaagatttagaagtatcttttatctcaatcttaaagcaaatttaataatttttaaccaaaaatcaatggtgatggatattaatgtaatagaaattaaaccctacactaatcatgagctatggagtccagagaagtttcttatgcctccccgaagtcctttgcatcatttagaaccgatcggtgtgggaactcctacagttgagagtttaaccagctatgtgacacggttagctcaatctcatggagtttttgtcagcacattactatcgagaatagttaatcccctcttgcagcgaacctttatcaaagattctaccagtagaggattagaaccgttttttaaccgttctcatgttttaaatggatatggaacgatagctactgattttgttgaggttcttaatcagttaaccttgtctaataagttaaagtttttaacattgatatccttttccaatattttagttgcaaaaggcttattacgtccttataaagcttggtgtccaatatgctacgaacaccggaaaaaaaatctagaagttatttatgaacccctgctatggtcactcaatgatgtcaagatttgtttaatacatcaacatcctcttgtgcaagattgtcctcattgttatcgcc

SEQ ID NO: 903 - DNA, 20062 bp, Chroococcus sp.
  source 1..20062: mol_type = other DNA; note = FPU101
tctcgttctactgcacctctttggaatgctcaacagtttacaagagaaatggaacacgctataatttaaagtttgtttttgccgaaatttaaagttagattttgccgacccattttttcaaaacctaataacttcaatatataaaatttttggtagaattttttttaaagcttgaatttgccgaaatagcaaatttaaagtttgacattgccgaaatagtctagactagctatgatgtttttattagtaagcttgttttaattttaggagggatacccatgctctctgatgctgaatttcaaacatggtgtgatagtttgcaactctcccaacaacaaagagatttggttaaccaaattcggacttccccacctgctcgtagagtaaaaggaggaggaagaaacgttcatggcccctatgctagttcaaaaatgggtagaacgattcaattcgagtctcataccgttgaactaccagctattactcaattctatgaatatgacgacacagttttagaatattgggatcaaccgattaaatttagtattaaatgctcaccgcaaggtaaacaagccaccactatcggtcattatcccgatttcttcgtgttgagaaagaatcattgtggttttgaagagtggaaaacagagaaaagactggaaaaacttagtgaggaacagccttatcgctatcaaaaaatagaagggcaatgggtagatgttattgttcaagaatatctcgaaaacttaggatattattattatcttcgctcagatagtgaaattgattgggtcaaatatcgtaatcagaaatatttacaatcctacaagcaagggtatttaaagcaactatacattattgatgagcaggtagaagctaatctgaaagaaattatcataaattatccaggaattaactttaccactctacttgagaaggcgaaaaatgccactattgatgatatcaataccttaatctctcttgaaaaagtttatgtgaatttaagcgaagtagccttagtggaacaagagaaagttcatttatttcgtgaccaggctaccgcaatggcttacatcacggcttctcatgattatcgtgaacccatatctagcagtgtgcagatggtggatcttaaagtagggtcatcatttttgttagatggtaaaagcctcaccattgaccatattggggaaagcaaaattattgttagaggagaacaaggaattattcgttggcaattcgcagaatttgaacaattagtcaaattaggagaaatcagtaatcttcagacagaaagccacaccactttaaatgaggaaggatggcaatactttttagaagccagtcctaaagcgttagagaccgcaaactatcgttatgcagctattaaaccttttttagatggaaaaccttataattctcaagaagaaaacctatcagaacgaaccttacgtcactggaaagccaaataccgaaaagcacaacaagaatacggaagtgggtttattggcttaattccccaacacaaaggaaactcaacacctcgctattgtgatgaggatttggaaataattgatcaagtaattgaagaacattatgaatcttttacacaaaagaacgtttggcagacttatgagattttgaaggatagatggaaagaattaagacaaatatctcctttgccaagtcataccttttattacgaaagagtgaaaaaacgaaacagttatcaacaaactaaaaaaagaatgggttctcgtgctgctaataattatttggggccttggttaattcgacctactaccccccgtcatggagatcgcccccttgaaattgtgcatattgaccatacacagctagatattcagtgtgtatgcccctatagtggcaaaaacttaggcaggccttgggtaacaggtatgattgatgcctatagtcggcgaattctagctttatacctcaccttcgataatccaagttaccgttcttgtatgatggctattcgcatctgtgtacaacggtttggacggtttcctgaatggattgttgtggataatggaaaagagtttagttctacttattttgagacattgttagcacgttttgaagctagtaaaaagcatcgtcccaaggattgccctaaatttagttcaattattgaacgttggtttggctcacagaatacggaatttatcaataacttgaggggaaatacccaaatcatgaagcacgtccgccttgttaaaaaagcaaataatccaaagaatttagctgtctggaatttagaagaattatatgattatttggcgttcggttatgcttatggagtttatgatagtacagaacatcctgctttagaaggaatgtcccctcaaaaagcctttgaattaggagttactaaaacgggacatcgccctcatcaatatattaaatatgatgagcaattcaagattttaaccttgcccacaaacaataagggaacagccaaagttatccctggtaagggaataagaattaattatcaagattattggacagatgaattttatagcgttgagaatcaatctgttcccgtgcgctacgaccccctagattatagtgttgcttatgcttatgttaataatcattgggtgaagtgtttatctaattattatatgaggtttcaaggtcattcagagaaggcagtagagatagccacaacaattggcagacgaaaacgccaaagctataatcaaagtcaatatctaggctctaaagagattgttgatttgcttaataacgcagaagaacatgaagagttattgctacaaattcgacgagatcaatcagctaaattagtctataatttaattgaaggaaagctgagtagtgctgtcttaaatgcagcaagtattgaatacccttcatctcaaaataatagagaaatcgagaagagtattttagaaatagaagaagatgttttaccttctagtttatctagagaaattaactttgataacattcaagcttttgctgaagaggaattatggtaatggataaagaacgtcgttttcctcaagaaattttacaagaaacaacagataacaaacttaagtattttaaagatgtgattgttcctcatcgcaatataagactaattttagagcagctactaaagaatgctatagaaccagatgatgctttagtttatctggtgtttggcgtaacaggagtaggcaaatcacgattaaaagcagaatttgaaaaacgattgcttaaacattttgaaaatgaaattatgtccaatcctggtagtttagtagtaggaggaatagaggtagatggtgctgaaggaggaaagtttaactattctgattactatattcaagttttggagtcattaaaggaagtattaatcgattataaagaaaattatacaattaattttgagaatgataacgaagataatttgataggagatcacgaaggaaaaaatgctaaagctttgcgtcgaacgatgcaaaaagttttcttacatcgtcagttaaaagcttataccctagatgaagcacagcatttatttgatgtggcaggaggaagacaaattaatgttcaaatgaactggctgaaatcaattgcgaataaaactcaaacagttcatgttttatttggtacgtatgaacttttaaaatgtcaagaagtgaatggtcaagtaggcagaagaagtgaagattattatttacctccctattatctagataaatcgcaagatcaacaagaatttattaaagtaattaagacattacagcagtatttaccagttgaagatgaaccacaattagaggaacgttgggaatattttatggaatactcaataggttgtgtggggattcttaaaagttggtggtatcgcgctctcaaaaatgctttagatgatgtggctaaaacggtgagaatgaaagattttaaagcgagagaattatcagcaggaagacgcaagaccattcaaaaagagttagaagcaggagaaagccgtttagcctatttatataacgaagaaaaagccatcaagcctgaattgactgattctcaaccgacaaagaaaggtggaaaggttggagaacgtaaggtagggagagacttagtaggagttaatcaagagggatgagtatttatgaggaactttggagtcccaaactactagaaatccctcaacgaagtcggttatttagtcttaaacctgtagggataggaactctaaacacagaaagcctcagtagttatcttaatcgtttagcacaagagcattgcttaacctcacaaaagctcattatgggagaaattgcaccacttattctgattaatgaggacaagtcagagctattaaccaaaagtgtgaatcatttattgggaaatagtgatgctaaacccgccattaacggaatgcggcagatgacgagacaattagtaactgttttagagcagttaaccatgcgacaagaattgcactttttaacccttttgagttggaaagggttgatttatgaccgaggactatttcggaataatcgtgcttggtgtccctgctgcttggaagagtggaaacaggagaagaaaacgatttacgagccgttgttatggtcatttaaagatgtggaggtatgtttgagccataaacaaaggttagttgatgaatgtccccattgtggttctagcttacctgtcatagccaagtcatcgtcatcgggtttctgttctcactgttatcaatggctaggaatagaaacagaaggaaaagaagatatagaaaaatatcgagttaatattcaaggcattggtgaattaattgcgctaactccccaattagaatacaaacccatttcaatagagttaacccgaaagttacagttaattttattagtgtttgagcaagcaatcggtaagaatttaaagttacttggagagttgggtaaaatgatggaacaattaaaaatagcgactaaacagcatcaaaataaaccttatcatttggtaaagctaataattcctgtctgtaaaaaggcaaagattagcgtatcacaattatttctggctaattttaaggagttcggagaaatcttgtttgagaattttggcttaaagttaagattatagaagcaatgtgaatttcattcaccaaattgggctatctaagtaataaacacaatttcttattcatcaactaaagatgtcctcggcgaaccaaacccctgaaaatcaagcccgtgaccttattgaccaaaaactagctcaagcgggatgggacgttcaagataaaaacgccatcaattttaatgccagcttaggaatagccgttcgagagtaccaaaccgatgcaggatatgtcgattatgcgcttttcgttgatagaaagccagtagggattattgaagctaaacgagacgaagaaggacatcgcctgactgttgtagaagaacaatcaagagaatatgctgatagcaaattaaaacacatcaacaatcaacccctgcccttcatttatgagagtacaggaaaactgactcgctttactgaccgccgtgacccgaaacctcgttcccgtctcgttttttctttccatcgtcctgaaaccttccaagaatggttgacccaatcgaaaagcttacgggatagacttcctgatattccgacacttgacccgactggactaagaaattgtcaagttatagcgattaacaacttagaaaagtcatttaagcgtaatctacctcgtgcattagttcaaatggcaacaggaagcggaaaaaccttcactgctattaccgccgtgtatcgtctcttaaagtttgctgacgctaaacgggtattattcctcgttgatacgaaaaacttaggagaacaagccgaacaagagtttatgagttttgttcctaatgatgataatcgaaaatttaccgaactctacaatgttcaacgtctctcatctaattatctcgctaaagatgctcaagtctgtatttccacgattcaacgtctttactccattcttaaaggttcacctttagacgaggcagccgaagaaacgaacccaaatgagatggtacaacgtaaacaacctgttcccgttgcctataatccgagagtaccgattgaattttttgattttattatcattgatgaatgtcatcgctccatttacaatatctggcagcaggttctagattatttcgatgcgtttctcattggtttaactgctactcccgaccttcgtacctttggcttttttaatgaaaacatagtcagcgaatacacccatgaacaagcggtcatggatggggtgaatgtcggttatgaagtctatactatcgaaactgaaatcactaaaaatggtagccgtttaattgctcaagaatttattgaaaaacgggaaaaactgacgcgtgagaaacgctggacacaaatagatgatgaaattgtctacgcaggaacacaattagaccgtgatgtggttaatcctagtcaaattcgtcagattattcgcacgtttcgggataaactgcctgaaatctttcctcatcgtcaagaagttcccaaaactcttatctttgctaaagatgatagccatgccgatgatatcatcaacatggtacgagaagaatttgacgaagggaatgatttttgtaaaaaagtaacctataaagctaaagaagacccgaaatcggtgttatctcagtttcgcaatggttataatcctcgcatcgctgttacagttgatatgattgccacaggaaccgatgttagacctcttgaatgtcttatctttatgcgggatgtaaaatcacgaaactattacgaacagatgaaaggacgaggaacgcgcaccctgagccatgatgagttaaaaaaagtttctggttctgccccatctgctaaaactcactttgtgattattgatgccgtaggtgtagagaaatctgttaaaaccgatagtcgccccttagaaacaaagcgtagtgttcccctcaaagacctaatgcaagggataatgatgggggcaactgatactgaggcttatacttctcttgcaggacgattagcccgtttagaacggcaagtcacctcagaagaagcccaagaagttcaaaatttgactcaaggagcaaaactaggagacatcgcccaagcgttactcaatgcgtgtgacttagatgttatagaggatagggcgaaacaagattatcaaaccgataatcctacacttgaacagctagaagcaatacatgaaagcttatcccgtcatgtttctggtttatttacaggacaactcattgaatatttagataatgtccgccaagttcatgaacagtatatcgacagccttaacttagataaggtaacttatgcaggatggagccaagaacagcagacacaaaatgaaacgctgataactgactttaaagcttttattgaagtaaataaagacgaaattactgccttacggatctattataatttaccctatcaacagcgacctgttacctatcaaatggtgaaagaagtgttagatatactgaaaaaagaccgtcctcaccttgcaccgttaaggatatggcaagcttatgcacaaatagaacaggttagcagtcagccgattaatgagttaactgcccttgttactttaatacggcgagttattggcttagatgaaaccctaacccctcatgagaaccgtattaatcgtgcttttcaaacgtgggtttttcaaaaacaggcgggtgcctcagtaaaatttaatgaagaacagatgcagtggctacgagcaatgaaggaacatattatcagttcttttgccctagaaagggaagatttagactatgcaccttttgatagtatgggaggtttaggaaaactttatcagctttttggggatgagatggaggctattattgaggagttaaacactgctttagtagtgtgaagaaaaattctaaagaaatgaataagtaatagaataatgacgggaacaaacggaaaaatagcagatttgccgaaaggctggatacaattacaattaaaagaaatatttaatccaaatcgtccaaaggtgtcacctcaagattactcagagttaccttttattggaatggaacatatcagttctcatacaatgaagttattgggaacagaacaagctaaaaacctgaaaagtaaagcagtatattttcatccaaatgatattttatatggacgattgcgcccttacttaaataaggtatttaagcctgatttttatggcttgtgttctgcagaatttattgtttttcctgaaaatgaagctataaatccaaaattacttcaatatttcttgaattctgctaaatttgtttctttcgcctctcatcttaatgagggagatagacctagagttggttttgatgtaattggcaattattatatagtacttcctcccttacccgaacaacatcgcatcgtggagaaaatcgaagaattattctcagaactcgataacggggtagaatacctaaaaaaagctagacaaaaacttaaagtctaccgtcaagctattctaaagtgggcgtttgagggtaaacttaccgaagcatggcgcaaagaacaccaagacaccctagaagatgctgaaactctcctcactcagattaaagcagaaagagagcgacactatcagcaacagttagaagagtgggaaaaagcggttaaagattgggaagcaagcggtaaaaatggcaaaaagcctactaaacctcaacaatcaaaggagttacccctgttaaccgaggaagaattaagcaagttaccgagtttacctgatggatggtgttgggtaagacttaatgagatttctgagaaaataactgacggagaacattcaactccagaaagaacagaaaatggttactatcttttatcagccagaaacattcaaaacagttatctatcttttgaaaaagttgattatattcctgaaagtgaatatataaggataattcaacgatgcaatccagaagaaggggacatcttaatatcttgctctggtacgattggtcggatttgtagagtacccaaaaatatactatttactatggtgaggagtgttgctcttatcaaaatacaacataataaatatttatcaaagtatttggaatatcaattgcaagctcccatacttcaaaaagttattcactctaagaaaaaagcaacggctcaagccaatctgtttttagctcctattagtgaattacctatggctattgctcctctattagaacaaactcaaattgttcaagaaattgaatctcgcttatcaatttgcgacaaattagaagccaccatcaccgagaatttagaaaaagccgaagctttacgccaaagtattctcaaacttgcttttgagggaaaactcgtatctcaaaaccctaatgatgaacccgccagcgaactcttaaaacgtattcaagcagaaaactccaatgaaacatcaaaatcttctcctaaacaacttgaattggatgtcacatctgcatgatttcattcttgatttttagaacaaactttctcatacaaacccataaataaaacttagctgatgaatactgcctctattgtttccaaagtttggagtttctgtaataccctacgagatgacggtgtaggctatggagactacctagaacaactgacttatctcttattcctaaaaatggcggacgaatacgccaaccccccctacaaccgccaaagtggtatccccttcgactacgactggcaaagtctccgtaccaaacgaggctcagatttggaagctcattatcttgttgtattgcgcgaattaggtcagaaaaaagggttactcggacaaattttcaccaaagcccagaacaaaatccaagaccccgccaaactctacaaaatcatcgccatgatagacgaagaaaactgggtgatgatgggtgcagatgtcaaaggtgatatttatgaaggattattagagaaaaacgccgaagatactaaaagcggtgcaggacaatactttacccctcgtgcgctgatttgggcaatggtggaatgtttgcgccctgaaccgatgaaaactatcgctgaccctgcttgtggtacaggcggatttttcctcggtgcttatgactttttagtcaaaaactataggttagacaaagaccaaaaagaatttctcaaaaaaagaacctttcgaggtaacgaaattgtcgctaatacccgacgcatggcactaatgaatatgtttttgcataatattggcgatatcgacgatgaacattgctttattgcctctacagatgccctcattgctccaccttctgaaagcatggattatgttcttgctaatcctcctttcgggaaaaaaagcagcctcacttttacaaatgaagatggagaacaagaccaagaagacttaacctacaatcgtcaagacttttgggcaaccacgtctaacaaacaacttaacttcgttcagcatattcgcgccatgctgaaaacaacaggaaaagcagccgttgttgtgcctgataatgttctttttgaaggcggtgcaggtgaaacggtcagaaagcaacttttacttaataccgacctgcatactattctaagacttcctacaggggttttttataaacaaggggttaaagccaatgtcatcttttttgataacaaacccgcagctaaacacccctggacaaaagaaatttggttttatgacttccgtactaatatacattttactctcaagaaaaatcctcttaaaaaagatgatttaggagattttatcacttgttatagccccgtaaatcgtcacaatcgtacagaaacttattcagaaaataacccagagggacgctggcgcaaattcacctatgaagaaattatcacacgcgataaaaccagccttgatattttctggcttaaggataaaagtttaaccgacctcgataaccttccagcacccgatattcttgctctagaaattctagaaaacttagaagctggattggagagctttcgtactattataggaagcttggaaaatagttagactcagattgattcacacctcagttaaatcaaggtggaattttaaacaacgcctaacggcattaagccacgaatcgcatcgcctctcaacgtcctacacgccgacgggccagttgaacaacgcctaacggcattaagccacgaatcacttcttgctctaattgaagaattttttcaaggttactttgaacaacgcctaacggcattaagccacgaatcactcccaaaggtagcccgtttgacaatccgccctaacgttgaacaacgcctaacggcattaagccacgaatcacaccgtcactactaaatcaacaccatcgttacgcacttgaacaacgcctaacggcattaagccacgaatcacagtcagcaagctaagattagattatggattgggatcttgaacaacgcctaacggcattaaccacgaatcacatcaccaaattttctactgaataccgtaacaatagcttgaacaacgcctaacggcattaagccacgaatcaccccaaagacgagaacctttgtctgatgaaggcttattgataatcttacaagtatctttcaaactaagatatcaaaaatgcaaaacttatcaccttttttttgtctgttaccacttaaatcttatttttataagcctttttgtgaaattgcaagcatcttctacctcaactaaatctgcatatcgcttatcttgtcaatcttttcaccatttctctacaataaattttcttactattcaaagatacttgttaaatcggtgatttaatcatcgtccatgctaaatcaggaggcaataatctatctatttcctccactcgatatcttaaagaacgggtatttcttatccccacatggtcaacccaatagggtaaagttaatcgtcctcgattatcccttatcacccaccgccttactccctctggatactcttcagagacaatttttatagtcttaatcaactggtcactttcccctaggaatagacagccaaaccgttttactaactgaggatagtcgaacgctgactgtattctatcccttaaacttggttgtcgcttctctccgtcagaacgaagccaaatcaaacattttagattagacaaaatctcttgataagagggattaacattttctggatgactaaaattagcattcttaaaccgtctcatctgacgcaaaatctgagactttctaggttcagataacattccaatggctatttctatcccacaatgacgatagatatccgtttcacctaccaacgacaacaacattccgtacaccgttgctggaggaggaacaggataagttctccctatttctcttgcatgagactctcgaaaagtcgcaaatggaacatctaaatagagaattaatggtgtcgtcattgtgatttttccaactccaaatctcttttaataaccgcttttaaagcttcaatcagttcattccgattacggttaagatgcgccttactaagatttgactgcttaaaattctccaactgttgtaactcttcaacaattgaccccccaatccaaagatcatcagggttaatttgaccgcattccacctcacctataaagtcttttgtcagcttaacctgctttcctttcccatgaccatcacaagcttcaaagcaataggaaatataagaagcaaaatgactcgtccattgaaaaataaaactatcgggacaaaaaggataattaaaaatattactatttcctcctactttgggaagttccataatcccatctatcagaggaagaatccgagaagggtctttcagatgagtagcgttaatgccaaagtaatattggtagcgggtcgcatgatattccgtgaaatgaagcgatgtactatccttttctctcccgctttttgctcctaactttaatgtcccatcatagggtgttaacgaaacagccatattcatccctaatgcacccattcgctgattaggagtgctaagttttgtttgtttctttcttttcttcgttgttgaagcatccccttctgtttcggcagactccaataaagcaaacccaaaaatgtcatcatctaaaaattgttctgggtcaaaatcctcactggttaaccgatttatatgttcatcttcatcccaaactctatttatagaataagctttcttttgaagataaaagcgtaatgcccagcgaatagcacttgaactgactaaagaatgaattttaccataccaataaactttttgtaataaagttttatttccttgcctcataccatgatttaaggatgctaaaccataacgagtaaggacagtaccataaagataataatttagaattttattgtcattattattctgattcatcatttactccttctagtttttgagtgtctggagatgaattttcattcgtattagtatgtttttctttgggtttataacttgctatcgctaacaaagaccaaactcttaactttttccaagaaacttcttctattatcaataaaactctatctttattttcatagaaatactcatttaatcctcccctagccaaaaaatctgctaggtattgctgaaacgacaattcatcatagcaacaattcaactctgcccttaatcgttcaactcttttttcaatgggagcttcttttcctttgtctgtcttagcatacactttagcaaagtagaccgacatggcgtgttgaaagacattaacgaaggtcagacacttttctttttgttcactaccttctaccataaatttcactcctctgcgattgtaaagtagctgtttgaatagatatccttttgaatcctctacaatcaatttttcccaaaaattagaccaccaagggagtcctcgtactaagttctcagcaatcagtgaccgaattgaattaactgtaataaggttttttttagaattaatgtgttgataattgggctgaaactgttgttgaaccacttgataggtgattaaaatatccttatcaatatcgatttctttaatactcatcacagttcgttgatgagacattttattcattttttcatataaccagacttgacaagcttgatagtagttatcgtcttgttgaacctcatctaagctgtaataaagtaaacctgcctcctcaatgctgctaacatgaagttgtttgactgctaattgttgtaatcgccatcgtctttgagaggcttcttcaaaattattaacttcaggaattaccacaaggtaacgatggggtttcctttccttcaagtcttctgaaggaaaatggagtaaccagtagtgacagacaacgggaacgaacaataaagcgaaagcatattcaggtttagcttccagtttcgtgactttctccaacatggcatgacgtactactccccctagatacaaccaactcgtaaattgaagataatcctgtttgagttgttgggtatttatctcgcataaatgttgtgcaaaagtttgatgagcgtaccaaagaagtggtttgtattgatactccacttcttgactttcaaccgttagttttgttttagcctgattccctgctttgtaaaacttattatgacgcaggaaaatagcacatatcccttcatggatgtggattttctgttctaattccattgcatcattttctaatcctgctaattgaattaaccccctatcatcgagttgaaaggattcttgcatcaaccatgagagcgcaactacatcactccctgcccagaataattcaatagtatcgggagtcaacaaccatgaaagatgtccagcacgatttcgagaatcaggaaatttctgttctaatcgttttaacgtcatgtaaagtcccgtcattcctacacggtgcattatcgttgtatcggaggcatcgagagacagggaaatttttggttgagtagcaactatcattgcgtctcctcctcttccttagtacgagttgctggaacaaacaccccgcacatcatcttgcgtttccccccaattccccgttcttgcaagattaaagaatcttctgggttgagttcactgatttttataccaaatcctcgtattttaaattgtcttccttgcttactaatggtgagttgtcgccgttggggagttccatcttgtcgggtaagaagttcaatctttccctgtattcctaaattatccagttgccgttgaacggcctcaataaaagtagaagggttttgaaaaccagtaatgacgactaatctagaataaagactttccgaggcaatcaaaggttgatagtcgggaatatttagttgataagattcttgaccgatttgaaacgtttgagcagttaagtaaggatatattaagggaatttgttgatgatgaatgcgaattattaaacgagattgctcattgagttcaagaaaattgttgctagttggaattccagcaataggatgaattccaatagaattaagttcatgaagaggtggacaaatacgggctaaggcagcgtagataatataaccattatcaaggggaatcggtgcgcctctaagcttaaaggttaggtctaaatattcttcactgtttatatgggtagctatcatagatgaacagtgttagaaaaattaatagtaaatattagaataatttgaaagaaacaaactataatagtacactataacttacttttagaattttgcaatatctcaagttaattttaagaaaaattttagcttctttaaacatttatggacataaagcttacccaaattcaaccctactctgaggatgagctatggagtccagagaagtttccaatgcctgagcgaagtcgcttacatcatttagaaccgattggcataggaactcctaaagttgagagcttgaccagctttgttactcgtttagccaactcacacgaggtttttcccagtattttattatcgagagttatcaatcctctcctacagcaaacttttattaaaaattatacaagtagaggactaaaaacattttttaatcgttctcatgctttaaatgggtatggaactatagccactgatttttcaaatgttattaatcaattaacgcttcataatcaactacaatttttaacattaatacccttttcaaatattttagtcacaaaaggtttattacgcccctataaagcttggtgtccaatttgttatcaagaatggaaacaaaacaaacacttgatttatgacctactactttggacactaaaagatgtaacagtttgtctgatacatcaatatcctctaatacaaaattgtcctcattgttgtcgtcaaatacattggttaagttggaaatcgaatttaggctattgctcatactgctctcagtggctaggaatagctcaaaataaagcaatttctaacaattctcaaatagttaatcaggaaagatggatggtcaatgctttgggagaattgctcgctaatgcttatcagctatcttccttactaactccagaacatatacaaaaatcttttaatattgctgtagaaaaatacactgatggtaatatagcggcttttgcagcaatgcaccaaattcctaaaaatacttgttggggatggtatacaggtaaaaattgtccttctctttctgctctactacaaatttgttattctcttcgtctttctttatctcaattcttaatgcaggattttcaacaaacagctactactcttaataaactaacatttgagcgtcaatcttctaaaaaggcacgattatcgcctcaaaactttaatctagagctaattgaaaacactttaactacgattttgtctcagtcctctgaatcattaccaacgctcatagatgttgctaaacaattaaatattaatcgacggcttctctcacgacattttcctgaactatgccgtcaaattgtagataaacgccgtcattatcagcatctttgtcatatagcttctattgataaatgttgtcttgaaattgaagaggctattattacactcggcaaattaggggaatatccaacagaagctcgtgtatgtgagcttattagcaaccctggatattttcgctataagaaggttcggctgctttataagaaagaagttcaatctattattaggagcttgtaatgccttatcaataaactattaagacaaatggttataacttgagctttcacaaatctagagttactcgtgtaatatttgtactattaagttgtgtcaggagccacgagtcatttttttaaagaataaacttgccatcagcatgaatactttttattaattatctcataaaatgtagttaatctttatttcattcgtcaagagaaatgatagaattaatactactatattaaataaattaaaatagaggaatttgtaatgtcaagccctcaaactggtatcgaatggacagataaaacttggaatccaacgacaggatgcgacaaagttagtacaggttgtaagtattgttatgcggaggcaattacagaaagatttgcacaaacttttcctcaaggattcaaattaactttacatcataacagacttagtgaacccaaacattggaagaatccaagtagaatttttgttaattctatgagtgatttatttcatgagcaaattcccttagagttcatcgaaaaagtctttaatgtaatacatgaaacaccttggcacatttatcaaattttgaccaaaagacatgaacgcttattgacaattgctccacaactgaagtggacagataatatatggatgggggtatctgtcgagaatcaaaattatgtttccagagtggaatctcttcgacaaataccagctaaaatacgtttcctttcttgtgaacctctattaggctcattaaaattagacctaactggtatagactgggtcattgtgggcggagaatcgggactaaaacatcgaccacttcaacaagaatgggttgaagatatattgcatcaagctcaagaagcaaatgtcgctttcttttttaagcaatggggtggcaagcattctaaagcaggtggtcgtcttttaaacggacaaacctgggatgaaatgcctcagtcttgggaaagtcatttacagcagtggaaagccaataatcttaagcaaaaacaactaagtcttatttagcttattgatctttcataaaaagataaagctattttttcagaaaaatctaagttgttttgttgatggctgtttaataatatcattcttctgtaaatctggcttttttccattaagtagcttgtcgtttcttataacttcaatatctccctccatccttaaaaaattaataagtttaacatattgttctctattggcaggatttagctccatagttttctcacataaattgagaaaagtaatttctttctgattatagattaaatctactaattgctgatgaagttttctaattgaataatcataattattttctgtaatatcaaattctagaaatgtctgattttcttcataataatctgttgttctaaaagtatatccgtaaatctcaaaataatattgatatgataaattattattttgccaaaatgagtctttgataacttgtaatgcagttaaacttttagatagatggatgagatagtataaaggtctagtatctccttttggaaccatagaaaaagtaaatgctttttcaaacttacctctttctctaaaaagtctcatggattcatttcttaaataacactgtaccgatgcactgcttaaatcagttattttttttaaatcgtaataactatctgcttcaagaatatcatggaatgctttttgaagtttggtatctcgttccgtgataaacctagcaataaaatcaatcataaatgtataaagaatttctgatttagtcaaactatgtatctttctaatactattcattgagacatcagtccaaccacaaggatctaaaagaaaaaatgaatggcctctaaaatgctcggctctcagtatgcaaaaatcaatcaatttctcgaactcaccgtgaaaaaattcacattgttcggttcttgttccaaattcatccttaaaagtgtgaattttttcatcacacaactcgtctaaaccagcacgcggcatagcataatttttaagataatctaaatgctctttttgattatctataaatatatattgaacattaagagaataatttctttgagattttttatatccttctctaactgcttgtattattttaactggagagccataccacatatctatctcttgagaatctttgtatagtccacctccacaaaatccatctataaatgtaaaattagttactccatatctaccttttccatataaagtatgtatgagattgacaatataagtctctagaatgtagtgtttggctttagtgtgaggctcggcttctggtatgacgctgccatcagcactccaagcaatattttgtcttctcataatcttctttaccagagtaagatatattaactaggataagtctacaaaaggttgatagaccttaattttcacaacagatatctcgtttcaataactgataacatctattatgagcgattgaattttctatcttttctaatattaatcctattcgacatttacaaatcaagctttacacattcttcattaaaaataaacctatctatactgttctaaggttgtactcttaagcaagaggtacattttagttatatttttatctcgctacagattcgacaaccgagttttctaggctgcctttaagtatgcaaggttttacgttaagctaaattcacactgcgtattgatgaacgatagaatcttcacaatagagatagttaataatgcacattatttttctcttaaatttttaaagcataatcttgccgctacatttttaaggcattactttgccgcaacggcaaaaacaaactttaaatgacagcctatcaacaaatgtatgctcaatatata

SEQ ID NO: 904 - DNA, 132 bp, unidentified
  misc_feature 1..132: note = Synthetic
  source 1..132: mol_type = other DNA
aaaaatacaaataattcagtaatatgtataacaataataaagtcgtataacaaataaaaaagttatacaatacataaaaaagttatacactttatcctgtaggcgcgtatgtgagcatctacaggagttttt

SEQ ID NO: 905 - DNA, 259 bp, unidentified
  misc_feature 1..259: note = Synthetic
  source 1..259: mol_type = other DNA
tgcttggtagatacacccataggaaaaatagtacaacttttttattcctccacaatattatgtaaacaactaaaaaagttgtacaatttgcgcggctacaaacactattctatcgttaggcactgagaatttttgaaaaaataaagttatacaattttattatgctactatctaaaaacaaataaaaaagttgtatagttttgcaacctacttccgtgtaaggatttgggaatatttgttccaagatttagtggcgatc

SEQ ID NO: 906 - DNA, 37 bp, unidentified
  misc_feature 1..37: note = Synthetic
  source 1..37: mol_type = other DNA
ctgctcaacgtctgacgacatctaatgttaaagaact

SEQ ID NO: 907 - DNA, 152 bp, Nostoc sp.
  source 1..152: mol_type = other DNA
tataaaattatactttaattcttgtgtagaggaataattcggttgaacaataaataattcgattcaacaattaataaaacgattgaacaataacctctgatggagtactattgtactaagtaaaggtgcgatcgcttccagaggttattttt

SEQ ID NO: 908 - DNA, 248 bp, Nostoc sp.
  source 1..248: mol_type = other DNA
aggagaaattgtataactttattatgtttccacaacaagtgtagacaaataatttgattgaacaatatttgagcctcaaatgcttaatctatcgtgatttacataataaaacggttgaacaatttaagcacactctctgtagtatacttacttgtcagcaaaaacatcgaataaaacggttgaacaattttgtaaaccctttcctgataaagatttgggatacttaaataagttgaagattaagttta

SEQ ID NO: 909 - DNA, 72 bp, Nostoc sp.
  source 1..72: mol_type = other DNA
gtgcttcaacattagatgccattaggcgttgagcaggtgtttcagcataggatgcctttaggcgttgagtag

SEQ ID NO: 910 - DNA, 154 bp, Nostoc sp.
  source 1..154: mol_type = other DNA
tctattaatagaggtagtagcgtttatgtggaggaataattcggttgaacaattaataattcggctaaacaattaataattcggttaaacaataaccctttacagagtacgcttgtattaagaagatatgcgatcgctctcaggggttattttt

SEQ ID NO: 911 - DNA, 269 bp, Nostoc sp.
  source 1..269: mol_type = other DNA
ttgaggactacctcaaaaagccatgaggaattgcacattgggttgtagtagcgtttaaactgtagccaaataattcggttgaacaatttgagcgcctcagatgcttattatttcgtgataaataagaaataacggttaaacaatttgattcatgactttcaaagacacttgattcttagtctaacaaacaaataaaacgattaaacaatttctcaaaaggtttatgtaacaacaatttgatggactcttcaaatttttaaacatcttct

SEQ ID NO: 912 - DNA, 38 bp, Nostoc sp.
  source 1..38: mol_type = other DNA
gttctttaacattagatgtcgtcagacgttgagcagaa

SEQ ID NO: 913 - DNA, 592 bp, Nostoc sp.
  source 1..592: mol_type = other DNA; note = 'Peltigera membranacea cyanobiont' 232
gtgtaatgaaataaaaaagttggataataattttaaaagttggataataaacaaaaagttggataataagtctgaaagcttttccatataagggaaagtaaaaacttgcctgccgccaccttgtcgaaaccgatggtaagatgggaaggattgcaagtcacagtaaattgcactcatataccttaaaaacctgaagaattgcagcccatagaacaactgtgatgagataaccaacttggataataattctaaaagttggataataaaccaaaaagttggataattaagtcttagacaaaaagtagtcagaaaaaaccatcaaacccctatgcagatagagtttggcgtcgttaagcctagtttattgatatagctaagtttcaagcatttttgagcctttagtgttttttccttgccctgcaaggacttgaggcttgtttttgcctcaaaaaggtttaagtcccgatagtagtgattcagacgctctctactcctgcggtgacaaaattaaaaagttaaacaataagcctaaaagctttacgatataaggaaaagtattagaaattgcttttttttagatgggctttatttt

SEQ ID NO: 914 - DNA, 539 bp, Nostoc sp.
  source 1..539: mol_type = other DNA; note = 'Peltigera membranacea cyanobiont' 232
acattcgcttctgtacaagaaaaactcagttcaatcagaaaattatcaaagtttttttcagaaaactacccaaatattatcccggaaaagataaaccgcgatgtcatcactgaatacacaatatatttagcaagtcaaaaattagcatcaagtaccagatataagtgtattagtgatgcaaaactgttttttgattccgcttatcaatatcaatggcttgatgtccgaaggtatttggttcgtcctgaagattttcctaagatagaaaaaagactccctcgctacattccagaagaagtaatgcagcaacttaatcaatacttggatgatttggcagagccaataatgcgaatgatattagtgttgcaagtgtgacgagataaaaaagttggataatattaaggcttgaaacccttgctattccgtatgtagaaaaattaaaagttggataatttaatgagcttaaagaagctgatactggtacatgaggtaaaatctgaataaaaaagttggataatttcttgaaagcattgtaaata

SEQ ID NO: 915 - DNA, 37 bp, Nostoc sp.
  source 1..37: mol_type = other DNA; note = 'Peltigera membranacea cyanobiont' 232
gtgatcaacgcctaaaggcaatctaatattgaagcag

SEQ ID NO: 916 - DNA, 276 bp, unidentified
  misc_feature 1..276: note = Synthetic
  source 1..276: mol_type = other DNA
cttttcgctagaaatgtgaagttttgatgaaatgctagtctaaacgacggatagtaaaactgtgactttacccataactttgccgcagccagaaccataactttgccgccaacaacgctataaccctctttcttgcgtcagctaattttggatgaaattgacacactggaaccataattttgccgttagtcaaaattagaaggataagcttgccgtgagtccaatcaagcatagaaagcaggaaagagccggattttttagaatagagcagaagca

SEQ ID NO: 917 - DNA, 192 bp, unidentified
  misc_feature 1..192: note = Synthetic
  source 1..192: mol_type = other DNA
ccggtcgcaagttcaaatcttgtcaccagctttttttcaagcaattttaatcgcgatcgctgtgactttacccataactttgccgcaacggcaggcttatacttccatttaacagtggcaatattatggttccagctttcactaaaattacttcattggtatagatagagcttgcttctcagttagcgattt

SEQ ID NO: 918 - DNA, 33 bp, unidentified
  misc_feature 1..33: note = Synthetic
  source 1..33: mol_type = other DNA
gtgattcttggctttatgccgttaggcgttgct

SEQ ID NO: 919 - DNA, 330 bp, unidentified
  misc_feature 1..330: note = Synthetic
  source 1..330: mol_type = other DNA
gcgattcaggcgaccgtaatttatgctgtcagcagctacgacatttcaaggttttttggatgtgcgctcggtgctttgctgctggacatcatgcttaggaaaaggctttactggcaacgtgatctgctgagcagcagcgcaacgcgatcgcaaaccagcagaaatttgccgggcatctgtgcgaggcgaggaaagttcaccttctcagccaaaacaggtgatctgcgctgacttttggagagtcgctttccagagagcagcagcgcaacgcgatcgcgccagattaaattgcctcctagcagctaattctcaaatgagggaaataagtta

SEQ ID NO: 920 - DNA, 240 bp, unidentified
  misc_feature 1..240: note = Synthetic
  source 1..240: mol_type = other DNA
cgtgtgggttcaagtcccaccgcccccatcaaaatttaccaataaccaaagcccttagtgtgtcactacaagcataagttgagcaaagtgctcactttatgcttgtaatttgagatggtcaacttatgcttgtaactcattaaacgcaggtgcgcttccagatgggcaaacttatgctttaaattttttccaatgcaattgagggatttaaaagcctccgattacttgaagcaccttaaa

SEQ ID NO: 921 - DNA, 36 bp, unidentified
  misc_feature 1..36: note = Synthetic
  source 1..36: mol_type = other DNA
gtgcttcgtggctttatgtctataggcgttgctcag

SEQ ID NO: 922 - DNA, 236 bp, Cyanothece sp.
  source 1..236: mol_type = other DNA
attagcttcgcggcaaaaacaaactttaaataatagaaagtattatttaaagtttgtttttgccgtattttaaagtttgtttttgccactcgattctctgaaaccctagtaaaatcgttgtactaaaattctagcatgaccgctttttcaagtttgagtttgccgaaatcgttattttcaggtttgacattgccgaaatagttgggacttgctatgatggttttatcgtaaatttg

SEQ ID NO: 923 - DNA, 136 bp, Cyanothece sp.
  source 1..136: mol_type = other DNA
ccgcccccattaccattttaagagatgctgcgagactttctattatttaaagtttgtttttgccgcatcggcaaggttatgcctgaaaatctgacagcaaagctatgcctgaaaaattttaagtcaaatagtcttg

SEQ ID NO: 924 - DNA, 36 bp, Cyanothece sp.
  source 1..36: mol_type = other DNA
gtgattcatggcttcatgccgttaggcgttgctcaa

SEQ ID NO: 925 - DNA, 278 bp, Nostoc sp.
  source 1..278: mol_type = other DNA
acaaaaattgacggtctaatattagcaatttgaatcgagagcataagctttatgctttcaacaatttgcgacaacaactataagttgtcctaaatgacaaccaatagttgaccaagatatgctttcaaagcctcattctttcgttagggcgatcatagcaaaaaaactattgacaagcattaattgacctaatgtgaaaatactaggcattagttgaccaaaagttataaattaaaaatccataaattcacatttaattaactgtgtgatgtaaacat

SEQ ID NO: 926 - DNA, 200 bp, Nostoc sp.
  source 1..200: mol_type = other DNA
ggggtcagcggttcgaatccgcttaactccatttgtacattaaataattattgtcagttttaaatgcgacaacaaccttaagttgtcctgattggtcactttatgcttgtgatactctctggtcaacttatgcttgtcaaatgttgcactccgcagtgagttaggtattagcaaacagaaatgagaggtaattattaagt

SEQ ID NO: 927 - DNA, 72 bp, Nostoc sp.
  source 1..72: mol_type = other DNA
gtgattcatggcttcatgccgttaggcgttgctcaagtgattcgtggcttgatgccgttaggcgttgctcaa

SEQ ID NO: 928 - DNA, 275 bp, Stanieria sp.
  source 1..275: mol_type = other DNA
tggtcggcaattttgttgggcggacggacattctttttcttatttactcgcaagcttgattgtcactggaagcataacttttcggcaattataaccataatatttccgccatccaatcaaatattgctattttgacgttaattattttgtaaaattttgaccttgtagaagcataacatttctgcaagtcaaaaatagaaacataagctttccgcaggtctatctctcaagatcgagcttctaaattggtttttgttttaggataatatattttt

SEQ ID NO: 929 - DNA, 234 bp, Stanieria sp.
  source 1..234: mol_type = other DNA
gtcaccggttcgagtccggttagctccatctgttgtaaattcaattattaaatgttgtgttgtcactggaagcataacttttccgccacggaaagcttatacttctaatgcactgcggaaatcttatacttccgatgcacgataatcaatacttagatagaaatattatagttaataactaaaaaggtttctggtatcgtgcgttgacgcagtggctcgctttgcgagatcgca

SEQ ID NO: 930 - DNA, 36 bp, Stanieria sp.
  source 1..36: mol_type = other DNA
gggcaaccagattagatgtcgtcaggcgttgtgaac

SEQ ID NO: 931 - DNA, 267 bp, unidentified
  misc_feature 1..267: note = Synthetic
  source 1..267: mol_type = other DNA
aatccgtgattacgacagtgagggtacagaatataggttaaaaattatcaaaaaaaattggaaccataagtttgccacatttgtgactttacccataactttgccgcgactagaaccataactttgccgccaacaacaccataacccttattcttacgtcagctaattttgggtgaaattggcatcttggaaccataattttgccgatagttcattttggaatgataagcctgccgtgagttcaatcgaatacagaaagcaggaaag

SEQ ID NO: 932 - DNA, 192 bp, unidentified
  misc_feature 1..192: note = Synthetic
  source 1..192: mol_type = other DNA
agtcagcggttcgaatccgcttagctccatttttaatagcttatgcttccaataaaatgttgtgactttacccataactttgccgcaacggcaagcttatgcttccaataaaatgtggcaaacttatggttccattttttcgtgataatttttaacatatattccgtatttcatattgtattacgaagtaac

SEQ ID NO: 933 - DNA, 36 bp, unidentified
  misc_feature 1..36: note = Synthetic
  source 1..36: mol_type = other DNA
gtgagtcttggctttatgccgttaggcgttgctcaa

SEQ ID NO: 934 - DNA, 206 bp, Nostoc sp.
  source 1..206: mol_type = other DNA
aggaatactagctgcgtgcgtaggcgtagcccgccgtaggcatcgctctctaatgatatttgtgacttgacccataagcttgccgttgcggcaaagttatgggtaaagtcacattggcgatggcaatgagggcaattttgtacaagaggatgttgatgtattaaacaaactttaacatcttgaaatttttctcaaaatttccatct

SEQ ID NO: 935 - DNA, 192 bp, Nostoc sp.
  source 1..192: mol_type = other DNA
gtcactggttcgaatccagttacgtccatttgttgtacagtgactaattatttgtcgttgtgtgactttacccataactttgccgcaacggcaagcttatggttccaatagagggcggcaaagttatgcttccaattttccatatatacagaaagaagctaactaagtctaccctttttaagtttaatagct

SEQ ID NO: 936 - DNA, 36 bp, Nostoc sp.
  source 1..36: mol_type = other DNA
gtaattcgtggcttgatgccgttaggcgttgctcag

SEQ ID NO: 937 - DNA, 298 bp, Anabaenopsis sp.
  source 1..298: mol_type = other DNA
agacaatccaaacaagtcaagagttcgtagtcaatagtgtaaggatttttgagtgttgactagttttaaatcactggaatgcaatttaaagcttggttttgccgtactttaaagtttgattttgccaccacattgtttgaaatctcagcaactcagttccacgaatatcctaacataatcagtttttaaagcctgagtttgccgaaatagcaattttaaagtttgacattgccgaaatagtctgaacttgttatggtgttttataggtaaaattgtactaattttagaggagataacc

SEQ ID NO: 938 - DNA, 192 bp, Anabaenopsis sp.
  source 1..192: mol_type = other DNA
gaggtcactggttcgaatccagttacgtccattcttgttgtacagtgactaatcgttttttgtaatttaaagtttgaatttgccgcaacggcaaagctatgcttgaaaactgtaacggcaaaatcatgcctgaaaaattttgaaaaaaaatcaatgtaaattatcaaccatctccattggtactgaaagttc

SEQ ID NO: 939 - DNA, 36 bp, Anabaenopsis sp.
  source 1..36: mol_type = other DNA
gtgagcaacgcctaacggcataaagccacgaatcac

SEQ ID NO: 940 - DNA, 236 bp, Nostoc sp.
  source 1..236: mol_type = other DNA
acaagtttatcgcggtttaatgtaatttaaagtttggttttgccgcagtttaaagtttgattttgccaccacattgtctgaaatcccggtaactcagttccacaaatatcctaagataagcagtttttaaagcctgagtttgccgatatagcaattttaaagtttgacattgccgaaatagtctggacttgttatggtgtttttataggtaaaattgtactaatttcagaggagat

SEQ ID NO: 941 - DNA, 188 bp, Nostoc sp.
  source 1..188: mol_type = other DNA
ggtcactggttcgaatccagttacgtccatattttttcagtgattgattatttatcatcgtgtgatttaaagtttgattttgccgcaacggcaaagctatgcttgaaaacagtaacggcaaaatcatgcctgaaaaattttgaaaaaatcaatgtgaattatcaaccatttccattcgtactgaaagt

SEQ ID NO: 942 - DNA, 34 bp, Nostoc sp.
  source 1..34: mol_type = other DNA
gagcaacgcctaacggcaataagccacgaatcat

SEQ ID NO: 943 - DNA, 252 bp, Nostoc sp.
  source 1..252: mol_type = other DNA
aagagtccggtcttaaatagtatcaaaaaaaagtctcgatttttgcagttcgcttaatattacttacacctttgccctcttatttctctgtgtcgcgccagttgctacaaaggggggaacccccgcaacgcactggcttctctgcgcctctgtggttttattcttctttaacgaaccgcagagacgcagagggcacagaggtaaaagcgaaaattctccgaaatattgagatgcaaagatgtaaataatttt

SEQ ID NO: 944 - DNA, 161 bp, Nostoc sp.
  source 1..161: mol_type = other DNA
gttcgagtctggtactgcccattcagtaaataaaggctagagacagcttagatgtggctttacccataactttgccgcaacggcaagcttatgcttccaataaagggtggcaaggttatggttccagttatataagctgttctagttttacatataacagc

SEQ ID NO: 945 - DNA, 37 bp, Nostoc sp.
  source 1..37: mol_type = other DNA
gtgattcgtggctttatgccgttaggcgttgctcaaa

SEQ ID NO: 946 - DNA, 507 bp, Cyanothece sp.
  source 1..507: mol_type = other DNA
acaaaatctcgctcccgtcccttttctttgctctctaattctttcattgggacaacaaccataaagtgaccaaactgacaactataagttgaccagagcaattgtcacttaaaggataaagtggccgcttttaaagcataaagtgaccgtccctggaatttagagtaaaagattgcctataagcataattaactggctttagtttttaagaaagagacgatcaccttttgttacggaataagttctagcgcccttgtagtttaggttttagacagcggccactttatcctttaaaaacggccactttttactttaagtaacagcaatccctgaaatgcttagtttttcgttggcgaattcaattgaaaatgtacgcttgacaatcataagttgtccgaaagtccaaaaaacaaccataaggtgtccttgagttccagcgacacaatgtttacactctctacaagacagcaacaagacagcaaccgaagcaagtaattaagaattttt

SEQ ID NO: 947 - DNA, 228 bp, Cyanothece sp.
  source 1..228: mol_type = other DNA
cgtcccatttctcccaagcataccgcgcagcattatgtcggttggacgaccgatttagatgaatgggacaacaaccataagttgaccaaattggtcactttatcgttgtcaaagaaggtggacaacttatcgttgttattgatgtcacttgagttaagaataaattagttatttaattttaatcctaactcatgtcgagttgtgttaaaaacttcacgcacttgagag

SEQ ID NO: 948 - DNA, 70 bp, Cyanothece sp.
  source 1..70: mol_type = other DNA
gtacatcatggtttactgcctattggcgttgctcagtgcatcatggctaactgcctaatggcgttatcta

SEQ ID NO: 949 - DNA, 252 bp, Planktothrix sp.
  source 1..252: mol_type = other DNA
ccaaatgctagttgaacaagctgattattttgttcgggtagcaattttagatgctgtaatttaaactctggttttgccgttgtttaaagctaggttttgccgtcacctcccttaaaccctcttaactccgtttcctaaatattctatcgagacggctttttaaaccctgattttgccgaaatttcatttttcaagtttggcattgccgaaataattaagagttgttatgatgattttatcatcaaagttaaa

SEQ ID NO: 950 - DNA, 176 bp, Planktothrix sp.
  source 1..176: mol_type = other DNA
actggttcgagtccagttgtgtccattgattattaagagttaagctgtttctgcatgtgtcatttaaactctggttttgccgtaacggcaaagctatgcctgaaaactgtaacggcaaaaccatgcctgaaaaatgctaaggagcaatagttgtagatgagcagccttccttactc

SEQ ID NO: 951 - DNA, 38 bp, Planktothrix sp.
  source 1..38: mol_type = other DNA
gtgattcgtggctttatgccgttaggcgttgctcagat

SEQ ID NO: 952 - DNA, 500 bp, Gloeothece verrucosa
  source 1..500: mol_type = other DNA; note = PCC 7822
tcttttaatggctctttctaaagagcgaccaccagttaaaacttcaacaactttaaagggaatttctctctcggcagctacctgacaaaatctcgctcccgtcccttttctttgctctctaattctttcattgggacaacaaccataaagtgaccaaactgacaactataagttgaccagagcaattgtcacttaaaggataaagtggccgcttttaaagcataaagtgaccgtccctggaatttagagtaaaagattgcctataagcataattaactggctttagtttttaagaaagagacgatcaccttttgttacggaataagttctagcgcccttgtagtttaggttttagacagcggccactttatcctttaaaaacggccactttttactttaagtaacagcaatccctgaaatgcttagtttttcgttggcgaattcaattgaaaatgtacgcttgacaatcataagttgtccgaaagtccaaaaaacaacca

SEQ ID NO: 953 - DNA, 257 bp, Gloeothece verrucosa
  source 1..257: mol_type = other DNA; note = PCC 7822
tctcccaagcataccgcgcagcattatgtcggttggacgaccgatttagatgaatgggacaacaaccataagttgaccaaattggtcactttatcgttgtcaaagaaggtggacaacttatcgttgttattgatgtcacttgagttaagaataaattagttatttaattttaatcctaactcatgtcgagttgtgttaaaaacttcacgcacttgagagtaccgaaaataactgggcttggtgataagttgagcaac

SEQ ID NO: 954 - DNA, 35 bp, Gloeothece verrucosa
  source 1..35: mol_type = other DNA; note = PCC 7822
gtacatcatggtttactgcctattggcgttgctca

SEQ ID NO: 955 - DNA, 316 bp, Nostoc sp.
  source 1..316: mol_type = other DNA; note = C052
tgacaataatttgtcatcgctactttaacagccatttaattcgtttgatgacaacaatttgtctctgacgacattaatctgtcaacgacgacaaattgtaatttaaagcttggttttgccgtactttaaagtttgattttgccactacattgcctcaatcccagtaaatccgttccacgaatatccataatataagcagtttttaaagcctgagtttgccggaatagcaattttaaagtttgacattgccgaaatagtctgaacttgttatggtgtttttataggtaaaattgtactaattttagaggagataacc

SEQ ID NO: 956 - DNA, 161 bp, Nostoc sp.
  source 1..161: mol_type = other DNA; note = C052
tttagaatcctgtacagtgactaattatttgtgtgacttaaagtttgaatttgccgcaacggcaaagctatgcttgaaaactgtaacggcaaaatcatgcctgaaaatttttgaaaaaaaatcaatgtgaattatcaactatctccattggtactgaaagt

SEQ ID NO: 957 - DNA, 32 bp, Nostoc sp.
  source 1..32: mol_type = other DNA; note = C052
gtgattcgtggctttatgccgttaggcgttgc

SEQ ID NO: 958 - DNA, 395 bp, Stanieria sp.
  source 1..395: mol_type = other DNA; note = NIES-3757
gatttattgtcattcctgctttgaggtcgtggctcaagcgttcgtggtcggcaattttgttgggcggacggacattctttttcttatttactcgcaagcttgattgtcactggaagcataacttttcggcaattataaccataatatttccgccatccaatcaaatattgctattttgacgttaattattttgtaaaattttgaccttgtagaagcataacatttctgcaagtcaaaaatagaaacataagctttccgcaggtctatctctcaagatcgagcttctaaattggtttttgttttaggataatatatttttgcagtaacttttttcatctcatcaattcataaacgtagaatcatctcaagagaaatataaatataaccgaccaata

SEQ ID NO: 959 - DNA, 265 bp, Stanieria sp.
  source 1..265: mol_type = other DNA; note = NIES-3757
caccggttcgagtccggttagctccatctgttgtaaattcaattattaaatgttgtgttgtcactggaagcataacttttccgccacggaaagcttatacttctaatgcactgcggaaatcttatacttccgatgcacgataatcaatacttagatagaaatattatagttaataactaaaaaggtttctggtatcgtgcgttgacgcagtggctcgctttgcgagatcgcaacaaaaggcaaactaaaatgataactgaagcaa

SEQ ID NO: 960 - DNA, 36 bp, Stanieria sp.; identical to SEQ ID NO: 930
  source 1..36: mol_type = other DNA; note = NIES-3757

SEQ ID NO: 961 - DNA, 353 bp, Rippkaea orientalis
  source 1..353: mol_type = other DNA; note = PCC 8801
caattagggaaaaagtaataaattttcatccttgccgtaacccaccgaattagatataaaaatcaattggaagcctaataatactaacatgaacattagcttcgcggcaaaaacaaactttaaataatagaaagtattatttaaagtttgtttttgccgtattttaaagtttgtttttgccactcgattctctgaaaccctagtaaaatcgttgtactaaaattctagcatgaccgctttttcaagtttgagtttgccgaaatcgttattttcaggtttgacattgccgaaatagttgggacttgctatgatggttttatcgtaaatttgtattaatttgaggagggacagcc

SEQ ID NO: 962 - DNA, 214 bp, Rippkaea orientalis
  source 1..214: mol_type = other DNA; note = PCC 8801
agctgaggtaaagcagtagcgaaagctgcaagagaatgaaaatccgttgaccgcaaggtcgtgagagttcaagtctctccgcccccattaccattttaagagatgctgcgagactttctattatttaaagtttgtttttgccgcatcggcaaggttatgcctgaaaatctgacagcaaagctatgcctgaaaaattttaagtcaaatagtcttg

SEQ ID NO: 963 - DNA, 36 bp, Rippkaea orientalis; identical to SEQ ID NO: 924
  source 1..36: mol_type = other DNA; note = PCC 8801

SEQ ID NO: 964 - DNA, 662 bp, Nostoc sp.
  source 1..662: mol_type = other DNA; note = NIES-2111
aaagggttcacggatggaatttactaacgacctatcttagtgaaggtgatgttttatatttaacaatgccagcaaatcagttatataaattgtggcgtgatgaacgggcttgtggagttggagattaggaattatattaacttccatctcacaaaaattgacgatctaatattagcaatttgaatcgaaagcataagctttatgctttcaacaatgcgacaacaactataagttgtcctaaatgacaaccaatagttgaccaagatatgctttcaaagcctcattctttcgtgagggcgatcatagcaaaaaaactattgacaagcattaattgacctaatgtgaaaatactaggcattagttgaccaaaagttataaattaaaaatccataaattcacatttaattaactgtgtgatgtaaacatagctttgcatctgaataagccagatgctaattctctcgtgagtgcgatcgctcctaaaataaaactgcaaaattatatgcttgcggaaattgggcttgatgcgatggtctgctggtcgcgctgtagcttctctgataggctgaaaaaagacctgcaagaagctcgcgctggcaaattattatgccgtccaacatcgcagtagaaatattaattaagtttcaaggtagcaaaataga

SEQ ID NO: 965 - DNA, 229 bp, Nostoc sp.
  source 1..229: mol_type = other DNA; note = NIES-2111
ggttcgaatccgcttaactccattttttataaagttaggttccataggtattgtttgcgacaacaaccttaagttgtcctgattggtcactttatgcttgtgatactctctggtcaacttatgcttgtcaaatgttgcactccgcagtgagttaggtattagcaaacagaaatgagaggtaattattaagtcagcagagattttacctaaattttagttgatcatctaa

SEQ ID NO: 966 - DNA, 36 bp, Nostoc sp.
  source 1..36: mol_type = other DNA; note = NIES-2111
gtgattcgtggcttgatgctgttaggcgttgctcaa

SEQ ID NO: 967 - DNA, 332 bp, Nostoc sp.
  source 1..332: mol_type = other DNA; note = NMS9
gcacttgcggtggtgtcgaatctggtggataaatcacatctacctgtgtaatttaaagcttggttttgccgtactttaaagtttgattttgccactacattgcctcaatcccagtaaatctgttccacgaatatccataatataagcagtttttaaagcctgagtttgccggaatagcaattttaaagtttgacattgccgaaatagtctgaacttgttatggtgtttttataggtaaaattgtactaattttagaggagataaccatgctctacgatgtcgagtttcaagcatggtgtgatagtttgcgactctcccaacagcaaagagat

SEQ ID NO: 968 - DNA, 161 bp, Nostoc sp.
  source 1..161: mol_type = other DNA; note = NMS9
tttgttgttgtacagtgactaattatttgtctgtaatttaaagtttgaatttgccgcaacggcaaagctatgcttgaaaactgtaacggcaaaatcatgcctgaaaaattttgaaaaaaaatcaatgtgaattatcaaccatctccattggtactgaaagt

SEQ ID NO: 969 - DNA, 36 bp, Nostoc sp.; identical to SEQ ID NO: 876
  source 1..36: mol_type = other DNA; note = NMS9

SEQ ID NO: 970 - DNA, 224 bp, Coleofasciculus sp.
  source 1..224: mol_type = other DNA; note = FACHB-SPT36
ttgacaatataatacataaataacagcgccgcagttcatgcttttaacagccgctgtgtcatttaaagtttgattttgccgtaatttaaagccaggttttgccgccccattctctcaaagcctcataaacccgttgtatgaatattctagcaagatagccttttaaagcctgattttgccgaaatagtatttttaaagtttgatattgccgaaatagacggggc

SEQ ID NO: 971 - DNA, 161 bp, Coleofasciculus sp.
  source 1..161: mol_type = other DNA; note = FACHB-SPT36
ttattttttttggtgccgctataggtggctttgtcatttaaagtttgattttgccgctccggcaaagttatgcctgaaaaccatagcggcaaaactatgcctgaaaaaaatgacgagaaaatagatgtagacgatcgactatcctcattcacactgaaagc

SEQ ID NO: 972 - DNA, 37 bp, Coleofasciculus sp.
  source 1..37: mol_type = other DNA; note = FACHB-SPT36
gtgattcgtggctttatgccgttaggcgttgctcaga

SEQ ID NO: 973 - DNA, 278 bp, Chroococcus sp.
  source 1..278: mol_type = other DNA; note = FPU101
tctcgttctactgcacctctttggaatgctcaacagtttacaagagaaatggaacacgctataatttaaagtttgtttttgccgaaatttaaagttagattttgccgacccattttttcaaaacctaataacttcaatatataaaatttttggtagaattttttttaaagcttgaatttgccgaaatagcaaatttaaagtttgacattgccgaaatagtctagactagctatgatgtttttattagtaagcttgttttaattttaggagggataccc

SEQ ID NO: 974 - DNA, 175 bp, Chroococcus sp.
  source 1..175: mol_type = other DNA; note = FPU101
tatatattgagcatacatttgttgataggctgtcatttaaagtttgtttttgccgttgcggcaaagtaatgccttaaaaatgtagcggcaagattatgctttaaaaatttaagagaaaaataatgtgcattattaactatctctattgtgaagattctatcgttcatcaatacgc

SEQ ID NO: 975 - DNA, 36 bp, Chroococcus sp.
  source 1..36: mol_type = other DNA; note = FPU101
gtgattcgtggcttaatgccgttaggcgttgttcaa

SEQ ID NO: 976 - DNA, 3721 bp, synthetic construct
  misc_feature 1..3721: note = Synthetic
  variation 563..564: note = n is a, c, g, or t
  source 1..3721: mol_type = other DNA
cgttacataacttacggtaaatggcccgcctggctgaccgcccaacgacccccgcccattgacgtcaataatgacgtatgttcccatagtaacgccaatagggactttccattgacgtcaatgggtggagtatttacggtaaactgcccacttggcagtacatcaagtgtatcatatgccaagtacgccccctattgacgtcaatgacggtaaatggcccgcctggcattatgcccagtacatgaccttatgggactttcctacttggcagtacatctacgtattagtcatcgctattaccatggtgatgcggttttggcagtacatcaatgggcgtggatagcggtttgactcacggggatttccaagtctccaccccattgacgtcaatgggagtttgttttggcaccaaaatcaacgggactttccaaaatgtcgtaacaactccgccccattgacgcaaatgggcggtaggcgtgtacggtgggaggtctatataagcagagctggtttagtgaaccgtcagatccgctagcgctaccggactcagatcgccaccatgnntgactagcataaccccttggggcgcactcctcaggtgcaggctgcctatcagaaggtggtggctggtgtggccaatgccctggctcacaaataccactgagatctttttccctctgccaaaaattatggggacatcatgaagccccttgagcatctgacttctggctaataaaggaaatttattttcattgcaatagtgtgttggaattttttgtgtctctcactcggaaggacatatgggagggcaaatcatttaaaacatcagaatgagtatttggtttagagtttggcaacatatgcccatatgctggctgccatgaacaaaggttggctataaagaggtcatcagtatatgaaacagccccctgctgtccattccttattccatagaaaagccttgacttgaggttagattttttttatattttgttttgtgttatttttttctttaacatccctaaaattttccttacatgttttactagccagatttttcctcctctcctgactactcccagtcatagctgtccctcttctcttatggagatccctcgacctgcagcccaagcttggcgtaatcatggtcatagctgtttcctgtgtgaaattgttatccgctcacaattccacacaacatacgagccggaagcataaagtgtaaagcctggggtgcctaatgagtgagctaactcacattaattgcgttgcgctcactgcccgctttccagtcgggaaacctgtcgtgccagcggatccgcatctcaattagtcagcaaccatagtcccgcccctaactccgcccatcccgcccctaactccgcccagttccgcccattctccgccccatggctgactaattttttttatttatgcagaggccgaggccgcctcggcctctgagctattccagaagtagtgaggaggcttttttggaggcctaggcttttgcaaaaagctaacttgtttattgcagcttataatggttacaaataaagcaatagcatcacaaatttcacaaataaagcatttttttcactgcattctagttgtggtttgtccaaactcatcaatgtatcttatcatgtctggatccgctgcattaatgaatcggccaacgcgcggggagaggcggtttgcgtattgggcgctcttccgcttcctcgctcactgactcgctgcgctcggtcgttcggctgcggcgagcggtatcagctcactcaaaggcggtaatacggttatccacagaatcaggggataacgcaggaaagaacatgtgagcaaaaggccagcaaaaggccaggaaccgtaaaaaggccgcgttgctggcgtttttccataggctccgcccccctgacgagcatcacaaaaatcgacgctcaagtcagaggtggcgaaacccgacaggactataaagataccaggcgtttccccctggaagctccctcgtgcgctctcctgttccgaccctgccgcttaccggatacctgtccgcctttctcccttcgggaagcgtggcgctttctcatagctcacgctgtaggtatctcagttcggtgtaggtcgttcgctccaagctgggctgtgtgcacgaaccccccgttcagcccgaccgctgcgccttatccggtaactatcgtcttgagtccaacccggtaagacacgacttatcgccactggcagcagccactggtaacaggattagcagagcgaggtatgtaggcggtgctacagagttcttgaagtggtggcctaactacggctacactagaagaacagtatttggtatctgcgctctgctgaagccagttaccttcggaaaaagagttggtagctcttgatccggcaaacaaaccaccgctggtagcggtggtttttttgtttgcaagcagcagattacgcgcagaaaaaaaggatctcaagaagatcctttgatcttttctacggggtctgacgctcagtggaacgaaaactcacgttaagggattttggtcatgagattatcaaaaaggatcttcacctagatccttttaaattaaaaatgaagttttaaatcaatctaaagtatatatgagtaaacttggtctgacagttaccaatgcttaatcagtgaggcacctatctcagcgatctgtctatttcgttcatccatagttgcctgactccccgtcgtgtagataactacgatacgggagggcttaccatctggccccagtgctgcaatgataccgcgagacccacgctcaccggctccagatttatcagcaataaaccagccagccggaagggccgagcgcagaagtggtcctgcaactttatccgcctccatccagtctattaattgttgccgggaagctagagtaagtagttcgccagttaatagtttgcgcaacgttgttgccattgctacaggcatcgtggtgtcacgctcgtcgtttggtatggcttcattcagctccggttcccaacgatcaaggcgagttacatgatcccccatgttgtgcaaaaaagcggttagctccttcggtcctccgatcgttgtcagaagtaagttggccgcagtgttatcactcatggttatggcagcactgcataattctcttactgtcatgccatccgtaagatgcttttctgtgactggtgagtactcaaccaagtcattctgagaatagtgtatgcggcgaccgagttgctcttgcccggcgtcaatacgggataataccgcgccacatagcagaactttaaaagtgctcatcattggaaaacgttcttcggggcgaaaactctcaaggatcttaccgctgttgagatccagttcgatgtaacccactcgtgcacccaactgatcttcagcatcttttactttcaccagcgtttctgggtgagcaaaaacaggaaggcaaaatgccgcaaaaaagggaataagggcgacacggaaatgttgaatactcatactcttcctttttcaatattattgaagcatttatcagggttattgtctcatgagcggatacatatttgaatgtatttagaaaaataaacaaataggggttccgcgcacatttccccgaaaagtgccacctgggtcgacattgattattgactagtaatagtaatcaattacggggtcattagttcatagcccatatatggagttccg

SEQ ID NO: 977 - DNA, 3814 bp, synthetic construct
  misc_feature 1..3814: note = Synthetic
  variation 656..657: note = n is a, c, g, or t
  source 1..3814: mol_type = other DNA
cgttacataacttacggtaaatggcccgcctggctgaccgcccaacgacccccgcccattgacgtcaataatgacgtatgttcccatagtaacgccaatagggactttccattgacgtcaatgggtggagtatttacggtaaactgcccacttggcagtacatcaagtgtatcatatgccaagtacgccccctattgacgtcaatgacggtaaatggcccgcctggcattatgcccagtacatgaccttatgggactttcctacttggcagtacatctacgtattagtcatcgctattaccatggtgatgcggttttggcagtacatcaatgggcgtggatagcggtttgactcacggggatttccaagtctccaccccattgacgtcaatgggagtttgttttggcaccaaaatcaacgggactttccaaaatgtcgtaacaactccgccccattgacgcaaatgggcggtaggcgtgtacggtgggaggtctatataagcagagctggtttagtgaaccgtcagatccgctagcgctaccggactcagatcgccaccatgtacccctacgacgtgccagactacgcccctaagaagaagagaaaagtcggcggctctggcggcggaggatctggcggaggtggaagcggagganntgactagcataaccccttggggcgcactcctcaggtgcaggctgcctatcagaaggtggtggctggtgtggccaatgccctggctcacaaataccactgagatctttttccctctgccaaaaattatggggacatcatgaagccccttgagcatctgacttctggctaataaaggaaatttattttcattgcaatagtgtgttggaattttttgtgtctctcactcggaaggacatatgggagggcaaatcatttaaaacatcagaatgagtatttggtttagagtttggcaacatatgcccatatgctggctgccatgaacaaaggttggctataaagaggtcatcagtatatgaaacagccccctgctgtccattccttattccatagaaaagccttgacttgaggttagattttttttatattttgttttgtgttatttttttctttaacatccctaaaattttccttacatgttttactagccagatttttcctcctctcctgactactcccagtcatagctgtccctcttctcttatggagatccctcgacctgcagcccaagcttggcgtaatcatggtcatagctgtttcctgtgtgaaattgttatccgctcacaattccacacaacatacgagccggaagcataaagtgtaaagcctggggtgcctaatgagtgagctaactcacattaattgcgttgcgctcactgcccgctttccagtcgggaaacctgtcgtgccagcggatccgcatctcaattagtcagcaaccatagtcccgcccctaactccgcccatcccgcccctaactccgcccagttccgcccattctccgccccatggctgactaattttttttatttatgcagaggccgaggccgcctcggcctctgagctattccagaagtagtgaggaggcttttttggaggcctaggcttttgcaaaaagctaacttgtttattgcagcttataatggttacaaataaagcaatagcatcacaaatttcacaaataaagcatttttttcactgcattctagttgtggtttgtccaaactcatcaatgtatcttatcatgtctggatccgctgcattaatgaatcggccaacgcgcggggagaggcggtttgcgtattgggcgctcttccgcttcctcgctcactgactcgctgcgctcggtcgttcggctgcggcgagcggtatcagctcactcaaaggcggtaatacggttatccacagaatcaggggataacgcaggaaagaacatgtgagcaaaaggccagcaaaaggccaggaaccgtaaaaaggccgcgttgctggcgtttttccataggctccgcccccctgacgagcatcacaaaaatcgacgctcaagtcagaggtggcgaaacccgacaggactataaagataccaggcgtttccccctggaagctccctcgtgcgctctcctgttccgaccctgccgcttaccggatacctgtccgcctttctcccttcgggaagcgtggcgctttctcatagctcacgctgtaggtatctcagttcggtgtaggtcgttcgctccaagctgggctgtgtgcacgaaccccccgttcagcccgaccgctgcgccttatccggtaactatcgtcttgagtccaacccggtaagacacgacttatcgccactggcagcagccactggtaacaggattagcagagcgaggtatgtaggcggtgctacagagttcttgaagtggtggcctaactacggctacactagaagaacagtatttggtatctgcgctctgctgaagccagttaccttcggaaaaagagttggtagctcttgatccggcaaacaaaccaccgctggtagcggtggtttttttgtttgcaagcagcagattacgcgcagaaaaaaaggatctcaagaagatcctttgatcttttctacggggtctgacgctcagtggaacgaaaactcacgttaagggattttggtcatgagattatcaaaaaggatcttcacctagatccttttaaattaaaaatgaagttttaaatcaatctaaagtatatatgagtaaacttggtctgacagttaccaatgcttaatcagtgaggcacctatctcagcgatctgtctatttcgttcatccatagttgcctgactccccgtcgtgtagataactacgatacgggagggcttaccatctggccccagtgctgcaatgataccgcgagacccacgctcaccggctccagatttatcagcaataaaccagccagccggaagggccgagcgcagaagtggtcctgcaactttatccgcctccatccagtctattaattgttgccgggaagctagagtaagtagttcgccagttaatagtttgcgcaacgttgttgccattgctacaggcatcgtggtgtcacgctcgtcgtttggtatggcttcattcagctccggttcccaacgatcaaggcgagttacatgatcccccatgttgtgcaaaaaagcggttagctccttcggtcctccgatcgttgtcagaagtaagttggccgcagtgttatcactcatggttatggcagcactgcataattctcttactgtcatgccatccgtaagatgcttttctgtgactggtgagtactcaaccaagtcattctgagaatagtgtatgcggcgaccgagttgctcttgcccggcgtcaatacgggataataccgcgccacatagcagaactttaaaagtgctcatcattggaaaacgttcttcggggcgaaaactctcaaggatcttaccgctgttgagatccagttcgatgtaacccactcgtgcacccaactgatcttcagcatcttttactttcaccagcgtttctgggtgagcaaaaacaggaaggcaaaatgccgcaaaaaagggaataagggcgacacggaaatgttgaatactcatactcttcctttttcaatattattgaagcatttatcagggttattgtctcatgagcggatacatatttgaatgtatttagaaaaataaacaaataggggttccgcgcacatttccccgaaaagtgccacctgggtcgacattgattattgactagtaatagtaatcaattacggggtcattagttcatagcccatatatggagttccg

SEQ ID NO: 978 - DNA, 3814 bp, synthetic construct
  misc_feature 1..3814: note = Synthetic
  variation 563..564: note = n is a, c, g, or t
  source 1..3814: mol_type = other DNA
cgttacataacttacggtaaatggcccgcctggctgaccgcccaacgacccccgcccattgacgtcaataatgacgtatgttcccatagtaacgccaatagggactttccattgacgtcaatgggtggagtatttacggtaaactgcccacttggcagtacatcaagtgtatcatatgccaagtacgccccctattgacgtcaatgacggtaaatggcccgcctggcattatgcccagtacatgaccttatgggactttcctacttggcagtacatctacgtattagtcatcgctattaccatggtgatgcggttttggcagtacatcaatgggcgtggatagcggtttgactcacggggatttccaagtctccaccccattgacgtcaatgggagtttgttttggcaccaaaatcaacgggactttccaaaatgtcgtaacaactccgccccattgacgcaaatgggcggtaggcgtgtacggtgggaggtctatataagcagagctggtttagtgaaccgtcagatccgctagcgctaccggactcagatcgccaccatgnnggaggatctggcggaggcggctctggcggcggtggaagcggaggacctaagaagaagagaaaagtctacccctacgacgtgccagactacgcctgactagcataaccccttggggcgcactcctcaggtgcaggctgcctatcagaaggtggtggctggtgtggccaatgccctggctcacaaataccactgagatctttttccctctgccaaaaattatggggacatcatgaagccccttgagcatctgacttctggctaataaaggaaatttattttcattgcaatagtgtgttggaattttttgtgtctctcactcggaaggacatatgggagggcaaatcatttaaaacatcagaatgagtatttggtttagagtttggcaacatatgcccatatgctggctgccatgaacaaaggttggctataaagaggtcatcagtatatgaaacagccccctgctgtccattccttattccatagaaaagccttgacttgaggttagattttttttatattttgttttgtgttatttttttctttaacatccctaaaattttccttacatgttttactagccagatttttcctcctctcctgactactcccagtcatagctgtccctcttctcttatggagatccctcgacctgcagcccaagcttggcgtaatcatggtcatagctgtttcctgtgtgaaattgttatccgctcacaattccacacaacatacgagccggaagcataaagtgtaaagcctggggtgcctaatgagtgagctaactcacattaattgcgttgcgctcactgcccgctttccagtcgggaaacctgtcgtgccagcggatccgcatctcaattagtcagcaaccatagtcccgcccctaactccgcccatcccgcccctaactccgcccagttccgcccattctccgccccatggctgactaattttttttatttatgcagaggccgaggccgcctcggcctctgagctattccagaagtagtgaggaggcttttttggaggcctaggcttttgcaaaaagctaacttgtttattgcagcttataatggttacaaataaagcaatagcatcacaaatttcacaaataaagcatttttttcactgcattctagttgtggtttgtccaaactcatcaatgtatcttatcatgtctggatccgctgcattaatgaatcggccaacgcgcggggagaggcggtttgcgtattgggcgctcttccgcttcctcgctcactgactcgctgcgctcggtcgttcggctgcggcgagcggtatcagctcactcaaaggcggtaatacggttatccacagaatcaggggataacgcaggaaagaacatgtgagcaaaaggccagcaaaaggccaggaaccgtaaaaaggccgcgttgctggcgtttttccataggctccgcccccctgacgagcatcacaaaaatcgacgctcaagtcagaggtggcgaaacccgacaggactataaagataccaggcgtttccccctggaagctccctcgtgcgctctcctgttccgaccctgccgcttaccggatacctgtccgcctttctcccttcgggaagcgtggcgctttctcatagctcacgctgtaggtatctcagttcggtgtaggtcgttcgctccaagctgggctgtgtgcacgaaccccccgttcagcccgaccgctgcgccttatccggtaactatcgtcttgagtccaacccggtaagacacgacttatcgccactggcagcagccactggtaacaggattagcagagcgaggtatgtaggcggtgctacagagttcttgaagtggtggcctaactacggctacactagaagaacagtatttggtatctgcgctctgctgaagccagttaccttcggaaaaagagttggtagctcttgatccggcaaacaaaccaccgctggtagcggtggtttttttgtttgcaagcagcagattacgcgcagaaaaaaaggatctcaagaagatcctttgatcttttctacggggtctgacgctcagtggaacgaaaactcacgttaagggattttggtcatgagattatcaaaaaggatcttcacctagatccttttaaattaaaaatgaagttttaaatcaatctaaagtatatatgagtaaacttggtctgacagttaccaatgcttaatcagtgaggcacctatctcagcgatctgtctatttcgttcatccatagttgcctgactccccgtcgtgtagataactacgatacgggagggcttaccatctggccccagtgctgcaatgataccgcgagacccacgctcaccggctccagatttatcagcaataaaccagccagccggaagggccgagcgcagaagtggtcctgcaactttatccgcctccatccagtctattaattgttgccgggaagctagagtaagtagttcgccagttaatagtttgcgcaacgttgttgccattgctacaggcatcgtggtgtcacgctcgtcgtttggtatggcttcattcagctccggttcccaacgatcaaggcgagttacatgatcccccatgttgtgcaaaaaagcggttagctccttcggtcctccgatcgttgtcagaagtaagttggccgcagtgttatcactcatggttatggcagcactgcataattctcttactgtcatgccatccgtaagatgcttttctgtgactggtgagtactcaaccaagtcattctgagaatagtgtatgcggcgaccgagttgctcttgcccggcgtcaatacgggataataccgcgccacatagcagaactttaaaagtgctcatcattggaaaacgttcttcggggcgaaaactctcaaggatcttaccgctgttgagatccagttcgatgtaacccactcgtgcacccaactgatcttcagcatcttttactttcaccagcgtttctgggtgagcaaaaacaggaaggcaaaatgccgcaaaaaagggaataagggcgacacggaaatgttgaatactcatactcttcctttttcaatattattgaagcatttatcagggttattgtctcatgagcggatacatatttgaatgtatttagaaaaataaacaaataggggttccgcgcacatttccccgaaaagtgccacctgggtcgacattgattattgactagtaatagtaatcaattacggggtcattagttcatagcccatatatggagttccg

SEQ ID NO: 979 - DNA, 633 bp, Homo sapiens
  source 1..633: mol_type = other DNA
atgaccacaatcgccctgaaggtggaagtgcctatcgcctgcttcagacagagccgggccagagagtacggcgagacatatcctgtgcctccacctagcaccgtgtacggcatgctgctgtctctcgtgggcgaagtggaccggtataagcactgtggcgtgaagctggctatcgccctgctgagcgagcctgagaagtccaccgtgatccggaccttccaccggttcaagaccaagaacatccacgacagcaagaacaacaagcccgactaccaagagctgctgaccaacatcgagttcatcgtgtgggtcgacgctggcgtggacaaggccaagcctaacctggtggaaagactggccgaggctctgaccaatcctgccagcatcaatagattcggcggcctgtgtctgggcgagagcagagatctggtcaacgacgtgaccctgctgcctaagaactactacgccgagagcatgcggtggctgatcagagatgagtacggcctgctgaccctgccttactgggttgaccacgtgggcagcagaggcaccagatggctgagatacgagatccagaaatgccccgtgttccagcctcctgagctgagctggacaagcgtgcagagcaactga

SEQ ID NO: 980 - DNA, 684 bp, Homo sapiens
  source 1..684: mol_type = other DNA
atgatcatcgacagcaacctggtcacccagctgcctagcgagagcagcagcaagcctagagaactgctgatgtctcagttcccctacatggacctgaccttcagcctgaccggcgagacactgcctttcgatcacggctacgagctgttcagcgctatcgcccacttcgagcctaagctgcacaccctggataccctgggcatccagacaatcgccggcattcctaaggacggcgtgatcaatctgacccagaacagcagactgcggatcagaatccccgtgaatcaagtgcggctggtgtatcctctggccggcaagtctctgagaatcggcaagcacaccatccggctgggaatccccgatatctgtctgctgcagcctgccgagaagctgagaagcagaatcgtggtcatccggggctacgaggaacccgagtcttttctggtggtggcccagagacagctggaacagctgggcattcaggccattgccagcattcccaccaaggccaacggcaagcccatcagacggaccatcaagatcaagcggttcaccgtcgtcggcttcggcctggaagtgatcaacctgagcgacgaggacagcctgagactgcagattcatggcgttggcggcaagcagaagatgggctgcggactgttcatgcccatcaaagaacggcagtga

SEQ ID NO: 981 - DNA, 975 bp, Homo sapiens
  source 1..975: mol_type = other DNA
atgttccacctgttcggcaacatcctgaccagctatggcaccgccgccaacaacagaggcgagaacgagggcaataccaccacactgcagaagctgatctggaagggcgaagtgcacagcaccgtgtcctctgaggccattagatgggccctgcggtactactggcagaacgccggctatcccgtgaacagaagatgggacgaaaacgcccagcctgtgcctgaccacattctgcaggaccccaacttcgacgacatccggttcatcgacgacgacgtgctgggctttatgcaggccgaagccgccaaagtggaagccgccgtggaaagcgaggtggaaatccagaacagcacccaggacgaggacaagaagctgagccagggcaaagagaaagagacagccaagcggaagcggaaagagaagcccaagggcaagatcaccacaagacggggcgtgctggaagtgaccagagccgtgtctacaatcccctacgccggcgacctgaccttcaatgccatgagcggcaagaagggcagaaccagcctgtacagcacagaggtgcacgccaccagataccagtacggctttgctctgacccctaacagcctgaaggacaagagccggatcaacgccgtgctggacagcctgatctctatcggagaggtggccggcaaccacgccagatttctgtacgacttcagccccgacagcatcatcctgagatggacccacgatttcagccctcggctgctgtactgcttcgaagaggacgagctgcggaacatcagcacccctgatctcgtgcggagagtggaatccggcgacatcgaccctaaagagctgtggatcggcggagccatcagcagcacactggaagatctgggcgccaacgtgttccccggcgtgaaaacaacagtcgaggccctgaagcaagtgatcatcgaggacctgcagctgagcctgagaagcagctga

SEQ ID NO: 982 - DNA, 1539 bp, Homo sapiens
  source 1..1539: mol_type = other DNA
atgatgaagcgggccgacaatcccaagatccagctgaacctgggcgacccctctatgaccctgcttcatagagctggcgtggccggcctgtggatgacactgaagaagctggaaaagatctaccccacaccagccgagcggatcggcaatctgacatggctgctgacccctcactacatcaacctggactgggaaggccaggacttcaccgtgctggattggctgctcaagcagagcttccagatcagcgacgagggcctgatctctctgacaggcctggacagccagaacatggacatccagaatcagatcatcatccaccagggcatcaccgccaccttcacacagcacaacaagttcttcaagtctgccggccagcagagcaagcagctgatcatcgatggcatccaagtgcgcgtggactacaagaaggccgcctcttacgcccaccagcactttgccaagcacctgtgcgatcagtacggccagctgctgaaagagcccatcggcatcagaggctggctgtatcctggcgccgttgtgcggcactacgccttcaaagagcagaccgccttcgaggaaaaggccgagtacgctctggccctgctgtttgcccctatggcctgccagtacttcgtgctgagaagccacacagagcccagccacaccaactacgtgctggtcatccccgaagtgatcgacctggaactgtacgcccacttcctgtggtgcctgggcaacctggattacaagcacttccacgtgtccagtctgggcgacgccggactgaagttcctgaactacaagaccacacagatgccgaccagcaacttcctgaagcggtgccagatcatcttcttcagcaccaaggcttggagcgagcagcagaaaaccagagccgagatcgccatcatcgagctgaacagcagcgtgaactacctgtacaagctgagctgcatctgcttccccgagtgtcagatcgtgctgtacaagaaccagcactacctgctgcctagcctgatcaagggcatcattgccaacaacctggccatgggcagatcttggtgggccaactggatcagcttcatcaagaacaagaagtccttcaagcagttcaccgacgagtacaagggaatcaacaagatgatccaggacagcgagtgggacatcgaggcccagaagctgttcattcaggcctgccacgaggccctgaggaagatctacgccaagatctacagccggaccaaagagggcgagtacgcccagatcgagagagagaacacccggatcctgagccagctgaagagatgcaccaacaccgacaatttccggaagtttatcgccgagttctggggcagagccggccagattgccattctggaagaacactggatggaactgctgcccctgaccaccggcatcggcaattggaaagtggcccgggacctgacctttatcgccatggcctcctatccgaagaacaaaatcaccgaggtggaagtgaagcctagccagatctccgagctgaataccgagtga

SEQ ID NO: 983 - DNA, 951 bp, Homo sapiens
  source 1..951: mol_type = other DNA
atgctgagcttcttccccacactgtaccccgacgagctgctgtactctaccctggccagataccacatcagaagcggcaacaagagcttcaagcagaccgacctggaactgttcggctacagcagccagcaaatctgcaagatcaccctgaccaacaacctgaactacctggtcaagaacctgcctctgcggagccagcagaaggtggaaaacctgctgcagaatcacaccctgtacagcttctacgccactctgctgatgccccaagaggcttggctgctgaagaacagcatgagcaacaagttcagcggcagcatcctggacttcgccaaggtggccaacaacagcagcgacgacagcaagaagttcctgaagttctgccccgagtgcctggaaaaggacacccagaagtacggcgagccctactggcacagaatccatcaggtgccaggcatcctcgtgtgccccattcatagagtggtgctgcacaacagctgcatcgaggtggaaagcaagggcatccactaccacgccgccagcatcgacaattgcctgctggctaacaacgtgaagaagctgacaaacaagaccgtggaaaccctgagcattctggcccacgacatcaactggctgatccacagcagcttcgccttccaaggactggcctggctgagagcccagtaccagagatacctgctggacaagggcctgctgaaaaccttcgctggcggcaagttcaagttcaacgactgcggcttcgcccagctgatcttcgagttctacggccaagagagcctggaagccctgaatcctaagctgacccagaaccagggcaagtacttcagccactgcctgtttggctgcgatctgaaccccgccatcgaccggatcacccatatcctgatgatcaagttcctggccaacagcatcgaggaattcttccagagctga

SEQ ID NO: 984 - DNA, 819 bp, Homo sapiens
  source 1..819: mol_type = other DNA
atggtccgtgggagaagagagtggacccaggccaaatacgagcggtacatcaaagaaggccgcggaagaggcagcggcaagcactataagccttggctgaccatccaggacgtgcccagcaagggcagaagctctagaacacccggctggaaaacaaaccgggtgcaccacttcttcagcgaccacgagaagcggctgttctacctgttcgagtggagcgacatcgtgaccgacatcagagagcagttccctctggacaacctggacctggccatgtctatcgccaccgacatcggcatcaagtaccccgtggatacccagagcggaacccctcacgtgctgaccagcgatttcatgctgaccgtgaaccgcgacggcaagcagatgcagatcgccagaacagtgaagcccagcaccgagctggaaaaaaagcaagtgaacgagaagttcgagatcgagcggcagtactacctggccaagggcatcgattggggcatcatcaccgagaaagagatccccagactgctggccgagaacgtggaatgggtgcacagcgcctatcggctggaagccaacagcgagatggatacagcccagctgagcgagctgagcaccatcctgaagtccaagctgcaagaagaggacaccaccatcaacagagtgaccaccgcactggacaaagagatgaacatcaacagcggcaccagcctgtacgtgttcaagcacctgatcgcccggaaagaaatcctggtggacctggtggccatcaagctgagcgcctgtcctagcaccaaagtgattgagaagatcatcttttga

SEQ ID NO: 985 - DNA, 2229 bp, Homo sapiens
  source 1..2229: mol_type = other DNA
atggtcaaggacctgttcgtgaacgacctgatcgagtggatcgtgtaccagaacacccacatcgtggaacggatcatctggatcgacgagggctacatcattgccttcgtgatcgacatcaacgccaagaagggcctgcctgagcctcggaagatcagcgatatcctggaagccatcaccgagggaatcgccttcaagcagcagcaggatccctgggccagaatcatcagggacgagaacctgaccgacaaagagaaagagtacagagacaaggcctgggagatcatcagcagcctgatcatcgaggaacccagcatctactaccggaacttccggggcagcatggtcaaagaagccgtggaaaagtacaacgaggaacgcgacaaggacaagctggtggaaaagaccgtgtacggctacctgcggcggttttggcagagaggcaagaccatcaacgctctgatccccgacttcatcaacagcagcggcaagggcaagatcagaggccagagcggcaagaagagaggcaggcctaggaagtacgcccacgatcctgatatcggcgagggcgtgaacgtgaccgaagaggacagaaagatcttccgggtgtccatcagcaagttctacaacaaccccaaagagaactacctgaccaccgcctacgagctgatggtcaaagagtactacaaagagggcatccgctacgacgagaacggcgtgcagaagtccatcctgacacctaccgacaagatccccaccatcacacagttcaagtactggtatcagctggaacaggacgacgtgaccaagacactgaccagcagaaagggcgccaagagagtggccctggaaaacagagccatcctgggcaacagcaagatggaaaccatcggacccggcagcagataccagatcgatgccacagtggccgacgtgtacctggtgtccaagtacaacagagactggatcatcggcagacccgtgatctacgtgatcattgacgtgttcagcaggatgatcaccggcgtgtacgtgggactcgagggaccttcttggatcggagctatgatggccctggccaacgtggccaccgataagaccctgttctgccaagagtacaacatcaatatcaccgagaacgagtggccgtgcaaccagatgcctgatgccattctgggcgacagaggcgaactggccggaatgacagtggaaacactgatccccaacctgtatgtgcggatcgagaacgccgccagctacagagccgattggaaaggactggtggaacggcacttccggatcatccacgagtacgtgaagcccttcctgcctggctacgtggacaccgacttcagacagagaggcgccagagactacagactggacggcaagctggacatcgaccagttcaccgagatcattatccggctgatcgtgcaccacaacaacaagcccctgaccgagtacgagcgggacgaagccatgatcgccgatgacacccctcctattcctcgcgagctgtggaagtggggcattgccaatagaagcggcagactgcggaccttcagcgaggacatcgtgaagctgaacctgatgcctaccgagaaggccacaatcaccgccaagggcatcaagatgcggggcaaagagatgtactatacctgcgacagcgccaagaacgagcagtggttcgagaaagccagaagcaacctgctgagcaagagcgagaagtccctgatcgtgtcctacgacatcagaaagcccaacttcatctacctgcctagcagcgacggccgggacttcgagaagtgcttcctgatcgacctggaaggcagatacgccaacaagaacttccacgacatcgagtacctgctggcctacgaggaactgcagagacagaagtcccagggcaagcagctgcaagagaaggtggacctgattgccgatatcgagtccatcgtggaccgggccgagaagatgacagatgccagccagtaccacaacctgagcaagtctaagaaggtgtccggcatccgggacaaccgggcctttgaaaaggccaagcggagagagaacgagggcttcgagctggccatcacagacaaccagagcagctttcaggtggccgagagcacagccgagacatctgaacagcccgaaagcctgcagcctaaccacctgaatctgctgaagaagaagagacaagagcgcaagcggggccagaactga

SEQ ID NO: 986 - DNA, 1671 bp, Homo sapiens
  source 1..1671: mol_type = other DNA
atggacagaatcgagagcgagctggtcaagatccccaatggcgagctggctgtgatcgcccggtacatcgatcagaagctgcccgagtacaacacgaaccctctgattcaggccctgcctcctattctgtctgccgccgagttcatcgacaaggtggccagagagcccaacttcgacgagcaagagagagagctggaaccccactaccggttccactgcatcgagcggctgagcagatacttcgaccctcagaacaagaccctggaactgcagaaagtgatctgcaccctgatcatgaccggctacctgagccggaacctgctgaagcctgagtacgccaacagaagccggcagatctacaacgccatcggcaatggcggcggaaagaacctggaaaactacgtgaacctgcctaccagcgccagcggcctgacactgattggacctagcggaatcggcaagaccaccaacttcaagaacatcctcgagctgtacccgcagatcatttttcaccccgactacagcgtgtaccagatcgtgtggctgagagtggactgccccaagacactgaagggcctgtgcatcgataccttcgccggcatcgataagctgctgggcaccaatctgctgaagaagttcaaccccgccagaaccagcgaggactacctgctggctcaactggcccagacagcccacacacatcatctgggcgtgctggtcatcgacgagatccagaatctggccacagccaagcggaaccgggatgagatcctgaacttcctggtcaagctggacaataccatcggcatccccgtgatcagagtgggcacaaacgaggccatcagttttctgcagggcaacctgcggaacgccagaagaaatactggcgagggcagcagaatgtgggacagaatggtcaacaacgacgagtggtgctacttcctggaaggcatctgggagtaccagtggaccaagacacccgtgcacttctccgatgagatcaaagaggtgttctacgacgagagccagggcatcatcgatatcgccatcaagctgtacaagatggtgcagtggcgggccatcagcatcggcgaccaagagatcatcaccgtggacctgatcagacaggtggccaaagaaggcctgtacctggttaagcccatgctggacgccattcggctgggcgacagagaatggatgatcaagtacaaggatatcgcccctctggacatcaccgagtaccacaacagatgcgtgtccgagatcgacgccaaggacctgaccgagatcaagcggctggccaagaagcagcaaaaccagcagaaggtgtcccctaagctgaattacgtgatcagcgagctgctgaaactggaagtggaaagcggcaaggccaaagagtgcgccgagcagattgtgtacagccacgaggaccctgacatccccattcctagcctcgtgaacaaggcctacgctctggctctgcaaggctgccaagtgaatgagagcctggccaaaacctccaccagaaaggccaagctcaagaccaagtaccaagagaacgacatccggcggatcgtggaaaacgccaagaaggacaagaagtccgcctacgaggacctgaagctggccggcatcatcaagaaccccgtggaagatttcatcaacatctga

SEQ ID NO: 987 - DNA, 633 bp, Homo sapiens
  source 1..633: mol_type = other DNA
atgaccaccatcgtcgtgaaggtggaagtgcctatcgcctgcttcagacagagccacgccagagagtacgccgagacatatcctgtgcctccacctagcaccgtgtacggcatgctgctgtctctcgtgggcgaagtggaccggtataagcactgtggcgtgaagctggctatcgccctgctgagcaagcctgagaagtccaccgtgatccggacctgccaccggttcaagaccaagaacatccacgagagcaagaacaacaagcccgactaccaggacctgctgaccaacatcgagttcgtcgtgtgggttgacgctggcgccgataaggccaaacctaatctggcccagagactggaagaggccttcacaaaccccgccagcatcaacagattcggcggcctgtgtctgggcgagagcagagatctggtcaacgatgtgtccctgctgcctgagaactactacgccgagtccatgcggtggctgatcagagatgattacggcctgctgacactgccctactgggttgaccacgtgggcagcagaggaaccagatggctgtgctacgagatccaagagttccaggtgttccagcctcctgagctgagctggaccagcatccagagcgattga

SEQ ID NO: 988 - DNA, 684 bp, Homo sapiens
  source 1..684: mol_type = other DNA
atgatcgtggacggcaacctgctgagacagatcccttctgagagccctcctaagcctcgcgagctgctgatgagccagctgccttacatggacctgaccttcaacctgatcggcgagacactgcccttcgaccacggctacgagctgttttctgctatcgcccacttcgagcccaagctgcacaccctggatacactgggcatccacacaatcgccggcattcccaaggacggcgtgatcaatctgacccagaacagcagactgagagtgcggatccccgtgaaccaggtccacctggtgtatcctctggccggcaagtctctgagaatcggcaagcacaccatccggctgggaatccccgatatctgtctgctgcagcctgccgagcagctgagaagcagaatcgtggtcatccggggccacgaggaacccgagacatttctggtggtggcccagagacagctggaacagctgggaattcaggccaccgccagcattcctaccaaggccaatggcaagcccatccgcaagaccatcaagatcaagcggttcaccgtcgtcggcttcggcctggaagtgaccaacctgagcaacgaggacagcctgacactgcagatccatggcgttggcggcaagcagaaaatgggctgcggcctgttcatgcccatccaagaaagacagtga

SEQ ID NO: 989 - DNA, 975 bp, Homo sapiens
  source 1..975: mol_type = other DNA
atgttccacctgttcggcaacatcctgaccacctatggcaccgccgccaacaacagaggcgagaacgagggcaataccaccacactgcagaagctgatctggaagggcgaagtgcacagcaccgtgtcctctgaggccattagatgggccctgagataccactggcagaacgccggctatcccgtgaacagaagatgggacgaaaacgcccagcctgtggccgatcacatctgggaagatcccaacttcgacgacatccggttcatcgacgacgacgtgctgggctttatgcaggccgaagccgccaaagtggaagccgccgatgagagcgaggtggaaatccagaacagcacccaggacgagaaccagaccacaagccagggcgaagagaagaaaaccagccagcggaagagaaagcagcggcccaagggaagaatctctgccagacggggagtgctggaagtgaccagagccgtgtctacaatcccctacgccggcgacatcaccttcaacagcatgagcggcaagaagggcagaaccagcctgtacgccacagaggtgcacgccaccagataccagtacggctttgccctgacacctaaccggctgaaggacaagagcagaatccacgccgtgctggacggcctgatcagcattggagatgtggccggcaaccacgccagattcttctacgacttcagccccgacagcatcatcctgagatggacccacgatttcagccctcggctgctgtactgcttcgaagaggacgagctgcggaacatcagcacccctgatctcgtgcggagagtggaagctggcgacatcgaccctaaagagctgtggatcggcggagccattgccagcacactggaaaacctgggcgccaatctgttccctggcgtgaaggctacagtcgaggccctgaagcaagtgatcatcgaggacctgcagctgagcctgagaagcagctaa

SEQ ID NO: 990 - DNA, 1497 bp, Homo sapiens
  source 1..1497: mol_type = other DNA
atgaagaccgccgccaatcctaagatccagctgaacctgggcgaccccagcatgacactgcttcatagagctggcgtggccggcctgtggatgacactgaagaagctggaaaagatctaccccaccgccgctcagcggatcggcaatttcacatggctgctgacccctagcaacatcagcctgtactgggaaggccaggacttcaccgtgctggactggctgctcaagcacagcttccagatctccgacgagggcctgatctctctgacaggcctggacagccagaacatggacatccagacacagatcatcatccaccagggcatcaccgccaccttcatccagcacaacaagttcttcaagtctgccggccagcagagcaagcagctgatcatcgatggcattcagctgcgcgtggactacaagaaggccgcctcttacgcccaccagcactttgccaagcacctgtgcgatcagtacggccagctgctgcaagagcccatcggaatcagaggctggctgtatcctggcgccgttgtgcggcactacgccttcaaagagcagaccgccttcgaggaaaaggccgagtacgctctggccctgctgtttgctcctgtggcctgccagtacttcgtgctgagaagccacacagagcccagccacaccaactacgtgctggtcgtgcccgaagtgatcgacctggaactgtacgcccagtacctgtggtatctgagcaagctggattacaagcacttccacgtgtccagtctgggcgacgccggcctgaagtttatcacctatgaggccaaacagctggacaacttcaacttcatcaagcggtgccaagtgatcagcttcagcaccaaggcttggagcgagcggcagaaaaccagagccgagatcgccatcatcgagctgaacagcagcgtgtcctacctgtacaagctgagctgcatctgcttccccaactgccaggtggtcatctacaagaatcagcacttcctgctgcctagcctgatgaagggcatcattgccaacaacctggccatgggctggccttggtgggccaattggatcagcgtgatcaagaacaacaagagcttcaagcagttcaccgacgagtacatcggcatcaacaagatgatccaggacagcgagtgggacatcgaggcccagaagctgttcattcaggcctgccacgaggccctgaggaagatctacgccaagatctacagccggatgaaggaaggcggctacgcccagatcgagagagagaacaccagaatcctgagccagctgaagcggtgcaccaacgccgacaatttcagaaagtttatcgccgagttctggggcagagccggccagatgacaatcctggaagaacactgggtcgagctgctgcctctgacaaccggcatcggaaattggaaggtggcccgggacctgacctttatcgccatggcctcctatcctaagaacaagatcaccgaggtgtag

SEQ ID NO: 991 - DNA, 948 bp, Homo sapiens
  source 1..948: mol_type = other DNA
atgctgagcttcttccccacactgtaccccgacgagctgctgtactctaccctggccagataccacatcagaagcggcaacaagagcttcaagcagaccgacctggaactgttcggctacagcagccagcaagtgtgcaagatcaccctgaccaacaacctgaactacctggtcaagaacctgcctctgcggagccagcagaaggtggaaaacctgctgcagaaccacactctgtaccccttctacgccaccttcctgatgcctcaagaggcttggctgctgaagaacagcatcagcaagaagctgagcggcagcatcctggacgtggccaaggtggccacaaacagcatcggcgactccaagaagttcctgaagttctgccccgagtgcctggaaaaggacacccagaagtacggcgagccctactggcacagaatccatcaggtgccaggcatcctcgtgtgccctacacacggaatcgtgctgcaggacagctgcgtgaaagtggaaagcaagggcgtgcactaccacgccgccagcgttgacaattgcctggtggcctgcaaagtgaagaacctgacaaacaacaccgtcaagaccctgttcaccctggtcaacgacatcaactggctgatccacagcaacttcgccttccaaggactggcctggctgagagcccagtaccagagatacctggtggacaagggcctgctccagacatttcctggcggcaagttcaagttcgacgagtacggcttcgcccagctgatcttcgagttctacggccaagagagcctggaagccatcaatcccaagctgacacagcaccagggcaagtacttcagccactgcctgtttggctgcgatctgagccccgccatcgacagaatcacccatatcctgctgatcaagttcctggccaactccatcgaggaattcttccagtga

SEQ ID NO: 992 - DNA, 819 bp, Homo sapiens
  source 1..819: mol_type = other DNA
atggccagaagcaagcaggattggacccaggccaagttcgagcggtactgcaaagaaggcagaggccaaggcagcggcaagaactaccagccttggatcaagatccaggacttccccagcaagggcagagtgtctagacctcctggctggaaaacaaacagagagcaccacctgttcagcgacaacgagaagcggctgttctacgtgttcgagtggagcgacgccatcgtggacatcagagagcagttccctctgctggacctggatctggccatcaatatcgccgacgagatgggcatcaactaccccaaggatccccagagcaacaccccttacgtgctggccaccgacttcatgctgtctgtgcagcagggcaagaatatcgtgcagaaggcccggaccttcaagctgaccaaggatctgggcagcaagagcgtggccgagaagtttgagctggaaaagcggtacttcgccgccaagggcatcgactggggaatcatcaccgagaaagaggtgcccaagcagctggccgaaaacgtggaatggatccacaccgcctacaagctggaagagaacgccgacatcaacctggaagaactgcggaatatcgccaacatcctgaagttccggctgcaagagtccgacgccagcatcaacaagatcaccaccgtgctggacaaagagatgaacatcgagagcggcaccagcctgtacctgttccggcatctgatcgcccggaaagaaatcatcatggacatgctcgtgaacaagatctccagctgtcccagcagcaaagagatccagaagatcatcttttga

SEQ ID NO: 993 - DNA, 2232 bp, Homo sapiens
  source 1..2232: mol_type = other DNA
atgatcaacgacctgttcgtgaacgacctgatcgagtggatcgacgagagcggcaacaacttcatcgagcgggtgctgtggatcgatgagggctacatcattgccttcgtgtacgacatcaacgccaagaccggctttcccgaggccaagaaggtgtccgagatcagagaggccatcagcgacggcagagccctgaagctgaagtccgatccttgggccagaatcgtgcgcgacgaggacctgagcgagaaagagaaagagctgcgggacagagcctggcagatcatcagcttcatcgtgacccaagagcctagcatctactaccgggactacagaggcaccctggtgcagcaagtgatcgagaagtacaacgccggcagaaccgagggcgagctggtgcctatcaccgtgtacaagtacctgcggcggttctggcagcggggcaagaacaaaaatgccctgctgcctgactacgccaactctggcggaaagggcaagcctaagagcagcggcgacaagaagagaggcagaccccggaagtatgcccaggtgccagagatcggcgtgggcagaaatgtgaccgaagaggacaagcggatcttcagattcgccaccgccaagttctacaacaacagcaaagagaacttcctgaccaccgcctacgacctcatgatcaaagagtactacgccgaggacttctactacgacgacaacggcgtgaagaagtccatcctgattcctccagacaagcggcccaccttcacacagttcaagtattggtacgaggtggaacagaccgacatccgcaagaccatgatcagcagaaaaggcagccggaaatacgccctggaaaacagagccatcaccggcaccagccagatggaaacaatcggccctggcagcagataccagatcgacgccacaatcgccgacgtgtacctggtgtccctgtacaaccggaactggatcatcggcagacccgtgatctacgtggtcatcgacgtgttcagcagaatgatcaccggcgtgtacatcggcctggaaggcccttcttggacaggcgctatgatggccctggccaatgccgccacagagaaagtgaagttctgcagagagtacggcatcgagatctccgaggacgagtggccctgcaagcacatccctgataccatcctgggcgacagaggcgaactggccggaatgacagtggaaacactgatccccaacctgaacgtgcggatcgagaacacagccccttaccgggctgattggaaaggcctggtggaacggcagttccggatcatccacggctacgtgaagcctttcgtgcccggctacatcgacaccgacttcagacaaagaggcggccacgactacagactggacggcagactgaacatcgatgagtttaccaagatcgtgatcttcctgatcctgcagcacaacaaccacgactatctgatcgactacgcccgggacgagatgatgatcacagacgacgtgaaccccattcctcgcgagctgtggcagtggggaatcgccaatagaagcggcaggctgagaacattccccgaggacatcgtgaaactgaacctgatgcctaccgagaaggccaccatcaccgccagaggcatcaagtttaagggcatgtactacacgtgcgagaaagcccggaaagagttttggttcgagaagtccagaagcagcctgctgagcaagagcgagaagtctctgaacatcagctacgacatccggcagcctaacttcatctacctgagaagccccaacggccgcgagttcgagaaaggatggctgctggaaagccagcagagatacctggacaagaacttctacgatatcgactacctgctggcctacgagaagctgcagaaccagaagcaccagggcacaagactgcaggccaaggccgatctgatcgccaacatcgagagcatcgtgtcccaggccaaagaagagacagaggccgtcctggacgacaccatcagcaacagacagaaagtgtccggcatcagacagaaccgggccgacgagaagaacgccagaagaaagaacgaggccttcgagctggccaaagccgagacacccaacaccgacaacaccaagaacctgatcaacacccagagcgaggacagcgaggatagcaagctgctgcagcccgaccacatggacctgctgaagcggaagagacaagagcgcaagaggggcaagtga

SEQ ID NO: 994 - DNA, 1674 bp, Homo sapiens
  source 1..1674: mol_type = other DNA
atggaaagcaacgaggaagaggtcgtcagcatccccaatggcaagtctgccgtgatcgcccggtacatcgatcagaagctgcccgagtacaacgccaatcctctgattcaggccctgcctcctatcctgagcgccgaggaattcatcgacaaagtgaccagaacacccgacttcgacgagcaagagagagagctggaagcccactaccggttccactgcatcgagcggctgagcagatacttcgaccctcagaacaagaccgtggaactgcagaaagtgatctgcgccctgatcatgaccggctacctggccagaaacatcctgaagcctgagtacgccagcagaagccggcagatctacaatgccatcaaggacggcggaggcaagaacctggaaaactacgtgaacctgcctaccagcgccagcggcctgacactgattggaccatctggcatgggcaagagcaccaacttccagaatatcctgaacctgtacacccaagtgattctgcaccccgagtactccgtgtaccagatcgtgtggctgaaggtggactgtcctcacgccggatctctgaagggcctgtgcaccgatatctttctggccgtggatagactgctgggcaccaactacttcaagaagttcggcagcagccggaacagcgaggactatatgctggctcaggtggcccagatcgcccacacacatcatctgggcgtgctggtcatcgacgagatgcagaatctggtcaccgccaggcggagaagcagcgatatgctgaacttcctggtcaagatggacaacaccgtgggcatccccgtgatcagagtgggcacaaacgaggcctttccaatcctgcagggcaacttccggaacgccagaagaggaacaggcgagggctctgtgatctgggacagaatggtcaacgacgacgagtggtacttcttcatggaaggcatgtgggagtaccagtggaccaagacacccgtgcctttcagcgacgagatcaacgaggtgttctacgacgagagccagggcatcatcgatatcgccgtgaagctgtacaagatggtgcagtggcgggccatcagcatcggcggcaaagagatcatcaccatcgagctgatccggcaggccgccaaggatggcctgtatctggttaagcccatgctggacgccattcggagcggcgacaaagaatggatgatcaagtacaaggatatcgcccctctggacaccaccgagtaccagaacaagtgcctgagcgagctggacagcaaggacctgaaagagattcggagactggcccggaagcagcagaaccagcagaaagtctcccctaagctgaattacgtgatcctcgagctgctgaatctggaagtggaacccgccaaggccaaagaatgcgccgagcaagtgatcgtgtcctccgacgaggatgccgagattcccagcctcgtgaagaaggcctacgctctggcactgcaaggcggccaagtgaatgagagcctgaccaagaccaacaccaagaaggccaagctgaagcccaattaccaagagaacgacatccggcggatcgtggaaaacgccaacaaagagaagaagtccgcctacgaggatctgaagctggccggcatcatcaagaaccccgtggaagatttcatcaacatctga

SEQ ID NO: 995 - DNA, 633 bp, Homo sapiens
  source 1..633: mol_type = other DNA
atgaccacaatcgccctgaaggtggaagtgcctatcgcctgcttcagacagagccgggccagagaatacgtggaaacctacagcgtgccacctcctagcaccgtgtatggcatgctgctgtctctcgtgggcgaagagaaccggtacacacactgtggcgtgaagctggccatcacactggtgtctgagcctgccaagagcaccgtgatccggaccttccaccggctgaaaacaaagaacattcacgaccccaagaacaacaagcccgactaccaagagctgctgaccaacatcgagttcgtcgtgtgggttgaccccggcgtggacaaggctagacctaacctggtgcagagactggaagaggccttcacaaaccccgccagcatcaacagattcggcggcctgtgtctgggcgagagcagagatctggtcaacgacatcaccctgctgcctaagaactactacgccgagagcatgcggtggctgatcaaggatgaacacggcctgctgaccctgccttactgggtcgaccatgtgggctctcagggcaccagatggctgagatacgagctgcaagagtgccaggtgctgcagcctcctgagctgtcttggacaagcgtgcagagcgactga

SEQ ID NO: 996 - DNA, 669 bp, Homo sapiens
  source 1..669: mol_type = other DNA
atgggcgacaacttccacgtgtccacacagagccacgccaccgaggttctgaaccctcagctgatctacgtggacctgagcttcagagtgatcggccagacactgcccatcgatcacggctacgctctgtacgccgctctgacccatctgcaggataagctgcacagcctggacgacctgagcatccagacaatccctggcatccccgacggcaacgatagcctgcacctgaacaaccacagcagactgcggatcagactgcccgtggacaagatccctctggtgtaccctttcgccggcaagagcctgacaatcggcagacacaagatccacctggaaatccctcagatgtacctgctgcaggccgtggaaaagctgcggagcagaatcgtggtcatcaagggctacgaggaacccaagggctttctggccgctgctcagagacagctggaaaaactgggcgtgcagggaatcgccagcattcccacaaaggccgatggcaagcccgagaggcggagcatcaagatcaagaagttcaccgtcgtcggcttcggcctggaagtgaccaacctgaacgacgaggacagcatcaccctgcagaagtatggcgttggcggcaagcagaaaatgggctgcggagtgttcgtgcccgtgaacgagaagagatga

SEQ ID NO: 997 - DNA, 999 bp, Homo sapiens
  source 1..999: mol_type = other DNA
atgagccacctgttcggcaacatcctgaccatctatggcaccgccgccaacaacagaggcgagaacgagggcaacatcaccacactgcagaagatcaactggaagggcgaagtgcacaccagcgtgtccgccgaagctattagatgggccgtgcggtactactggcagaacaacggctacgaagtgaatcggagatgggacgagaacgcccagcctctggccgatcacatctggcaggacaccaacttcaacagcgtgcggttcatcgacgacgacgtgctgggctttatgcaggccgaagccgctagagtggaagccggcgaacaatctggcggagaggtgcaagaagcctctgccggcgagatccagaacgtgtcccaggacgaggaaaccgcctctcctaaaggcaagggcaagaaaaccagccagcggaagggcagagaaagatcccagggaagagtgaccgccaagaggggcgtgctggaagtgacaagagccgtgtctctgatcccctacggcggcaatatcaccttcaatgccgtgtccggcaccaagggcagaaccagcctgtatggaacagaggtgcacgccaccagataccagtacggcttcgccatgacacccaacagcctgcaggacaagagcagaatcaacgccgtgctggacggcctgatcagcatcggagaagttggcggcaaccacgccagatttctgtacgacttcagccccgacagcatcatcctgagatggacccacgatttcagccctcggttcctgtactgcttcgagcaggatgagtggggcaccatcagcgtgccagatctcgtcagaagagtcgaggccgaggacatcgaccccaaagagctttggatcggcggagccattgccagagatctgggaaacctgggcgccaacgttttccccggcgtgaagaaagtggtggaagaactgctgaaagtgatcacccgggacctgcagctgcctcctagaagctcttaa

SEQ ID NO: 998 - DNA, 1533 bp, Homo sapiens
  source 1..1533: mol_type = other DNA
atgatcaacaccaccgccaacagcaagatccagctgaacctgagcgacagcagcaccacactgctgcacagagccggaatcgccggcttttggatgaccctgaagcagctggaagagatctaccccaatcctgctcagcggaccggcaatctgacatgggtgctgacacctcacagcatcagcctgaactgggaaggccaggatttcgccgctctggactggctgctgaagcagagctttcagatcagcgacgagggcctgatcttcctgaccggactgaaccctaaggccatccacatcgagcggcagatcatcatccaccagggaatcaccggcacctttctgcagcacaacaagttcttcaagttcagcgacaagaagctgaagtccatcatcgtggacggccggcagttcgtgaccgagtacaagagcgccatgagctacgcccaccagcacttcgccaagaaactgtgtgatgagagcggccagctgctgcaagaacccatcggaatcgttggctggctgtatcctggcgccgttgtgcggcatagcgcctttccaaagcagaccaagttcgaggaaaagcccgagtacgccctggctctgctgtttgtgcctgtggcctgccactacttcatcctgcggagccacacaaagccccagagcaccaactacatcctggtggtgcccgaagtgaacaacctggaattctacgcccagcactgctggaacctgtccaacctgagctaccgggacttccacgtgtccagcctgagagatgccggcctgaagtttctgaccaacgaggccgccatccagatcaagcagaactgcgtgaagcggtgccaggtgttcagctttggcaccctgatttggagcgagcagcagaaagtgcggaccgagacagccacactggaactgacagagaaggtgtccttctactacaagttctcccggtcctgcttctccaactaccggatcgtggactacgagaatcagcactttatcctgaccagcctggtgcagggcatcattgccaacaatctcggcctgggactgccttggtggaacgacttcggcaacatcctgacctccagcaacctgttcaaccagatcgccgacgagaaccagggcatctacatgatgatccaagagtccgagtgggacatcgagagccagaagctgttcatcaaggcctgtcacgaggccctgaaagtgatctacgccaagatctacagccggaccaaagagaacgaatacgcccagatcgagcgcgagaacaccaagatcatcagccagctgggcagatgcaccaacgccgagaacttcagaaagtttatcgccgagttctggggcaaagccggacagctgagcatcctggaagaacactgggaagaactgctgcccatcaccacaggcgtgcggcactggaagatgagcagggacctgacctttatcgccattgccagctatcccaagagcaagaacatcaagcccgagagcagcgagatcagccagaccagctctgagtga

SEQ ID NO: 999 - DNA, 948 bp, Homo sapiens
  source 1..948: mol_type = other DNA
atgctgagcttcttccccacactgtaccccgacgagctgctgtattctgccctggccagataccacatcagaagcggcaacaagaccttcaagcagaccgacctggaactgttcggctacagctctcagcagctgtgcaaagtgaccctgaccaacaacctgaactacctggtcaagaacctgagcctgttcagccagctgaccgtgtccgacctgctgcagaaccacactctgtaccccttctacgccagctttctgatccctcagcaggcctggcagctgcaggacagcatgagaaagaagctcggcggcagcatcctggaagtggccaaggtggccaatcacagcgccgacaacagcaccaagtttctgaagttctgccccatctgcctggaacaggacacccaagagtacggcgagccctactggcaccggatccatcagatccctggcatcctcgtgtgcgccacacatagagtggtgctgcacgatagcagcgtggccgtggattctaagggcatccactactacgccgcctctccagagaactgcctgaccaatcagaatcaagtgaagtgcgccgataacaccgtggaaaaactgctgattctggcccacgacatctggaatatcagcaccatcaacatccctttcaagggcctgacctggctgagaaaccagtaccagagctacctgatcaaccagaaattcatgaccctgctgcctggcgagaagttccggttcaacgagaagtccttcagcaacagcatctgcgacttctacggccaagagttcctggaaatcatcaaccccaacctgatcagaaaccccgacaagtacttcagcggctacctgctggcctgcgatctgaaccccgtgatcgacagaatcacccatatcctgatcatcaagttcctcgccaacagcgtcgagatcttcttcacctga

SEQ ID NO: 1000 - DNA, 819 bp, Homo sapiens
  source 1..819: mol_type = other DNA
atggccaggaccaagcaagaatggacccaggccaagttcgagcggtacatgaaggaaggcagaggccaaggcagcggcaagaactaccagccttggatcaagatccaggacttccccagcaagggcagagtgtctagacctcctggctggaaaacaaacagagagcaccacctgttcagcgaccacgagaagcggctgttctacctgttcgagtggagcgacagcatcatcgacatcagagagcagttccctctgatcgacctggacctggccatgaatatcgccaccgagatggccattgagtaccccaaggacgtgaacaacaacaccccttacgtgctgaccaccgacttcatgctgagcgtgaagcagggcaagcagatcgtggaaaaggcccggaccttcaagctggtcaaggacctgggcatcaagagcgtggccgagaagtttgagctggaaaagcggtactacaccgccaagggcatcgactggggcatcatcaccgagaaagagatccccacactgctcgtgaagaacgtggaatggatccacagcagctacaagctggaagccgccgctgagatcaacgtggacgagctgaacaacattgccaacatcctgaagtccaagctgcaagagagcgactccaccatcaacaagatcaccaactgcctggacaaagagatgaacctggaaatcggcaccagcctgtacatcttcaaacatctgctggccaacaagaaaatcatcatggacatgcagaccaacgccatcagcagcagcatcagcgccagagagatccagaagatcatcttttga

SEQ ID NO: 1001 - DNA, 2229 bp, Homo sapiens
  source 1..2229: mol_type = other DNA
atgaacaacaacctgttcgtgaacgacctgatcgagtggatcgacgagagcggcaacaacttcgtggaacggatcatctggatcgatgaggcctacatcattgccttcaccatcgacatcaacatcaagaccggctttcccgtgtccaagcgggtgtccgatatccaagaggccatctacgaaggcagagccctgaagctgagaacagacccctgggccagaatcgtgcgggacgaagatctgagcgccaaagagaaagagatccgggacaagtactgggacatcatcagcagcatcgtgatccaagagcctagcatctactacagagacaagcggggcagcctgatcaagcaagtgatcgagaagtataacaacaacaagagcgaggggaagctgatcgagcggagcgtgtaccagatcatcagacggtactggcagagaggcaaggacaagaacagcctgctgcctgactacgccaactctggcggcaagggaaaagtgcgggccagcagagagaagaagagaggcagacctcggaagtacgcccacgagcctgatatcggcgtgggcatcaatatcaccgacgaggacaaaaagatcttccggctggccgtgaccaagttctaccacaaccagaaagagaacttcctgaccaccgcctatgacctgatgatcaagaactactacagcgaggaaacgatctacgacgagaacggcgtgaagaagcacatcctgattccacctgacaagcggcccacactgacccagttcaagtattggtacgacgtggaacagggcgacatccggaagaagatcatctccagaagaggcgccaagaagtatgccctggaacacagagccatcaccggcaacagcaccatggaaacaatcggccctggcagcagataccagatcgacgccacaatcgccgacgtgtacctggtgtccgcctacaacagaaactggatcgtgggcagacccgtgatctacgtggtcatcgacgtgttcagcagaatgatcaccggcgtgtacgtgggctttgagggcccttcttggatcggagctatgatggccctggccaatgccgcctctgataaggtggccttctgcaaagagtacggcatcgagatcaccgaggacgagtgggcctgtcatcacatccctgatgccatcctgggcgacagaggcgaacttgccggaatggctgtggaaacactgatccccaacctgggcatcagaatcgagaacgccgctccttaccgggccgactggaaaggactggtggaaagacacttcggcatcatccacggccacatcaagcctttcgtgcccggctacatcgacaaggacttcagagagaggggcgccagagactacagactggacagcaagctggacatcgagcagttcaccgagatcatcatcaagatcatcctgtaccacaacaacgagcactacctggacaactacgagcgcgacgaggccatgatcgccgatgacgttccacctattcctcgcgagctgtggcagtggggaatcgccaatagaagcggcagactgcggacaatccccgaggacatcgtgaagctgaacctgatgcctaccgagaatgccaccatcaccgagcggggcatcaagttcaagggcatgtactacacctgtcagaaagccaagaacgagttttggttcgagaaggccagaagcaacagcctgagccggctggaaaagaagctggaaatcagctacgacattcggaagcccgactacatctacctgagaagccccgacggccggaacttcgagaagtgctttctgctggaaagcgagagcaagtacttcaacaagaacctgcacgagatcgagtacctgttcgccttcgaggaactgcagaagcagaagaacaagggcctgaagcagcagcagaaggtggacctgattgccgagattgagagcgtggtcaacaaggccaagaaaatgaccgaggaaatgaaggacgacaagctgagcaaccggaagagaaccgccggcatcagagacaacagaagcgccgagaagtccaaacggcggaagatcgagggcttcgagctggaaaaatccgaccacgagaacaccagcaacaccgtggatatcgagagccagaaagtggaacagccccagagcctgcagcctaactatctggacatcctgcggcagaagcgcgaggaacgcaagcgcgaacaggacaagtaa

SEQ ID NO: 1002 - DNA, 1689 bp, Homo sapiens
  source 1..1689: mol_type = other DNA
atgaacaagatcaacgactggaaatgggtcgagatccccaacggcaaatctgccgccgtggccaagtacaacgaccacaagctgcccgagtacaacaacaaccctctgattcaggccctgcctcctatcctgagcggcgaggaattcatcgagaaggccatcatcctgcctagctacgcccctgaagaaagagagatggacgcccacagacggttccactgcgtggaaagactgagccggtacttccagcctctgaacaagaccgtgaacctgcagcaagtgatgtgcgccctgctgatgcagggctatatcgcccggaacatcagcaagcctgagtacgccagaagaagccggcagatctacgaggccattaaggccggcgacggcagaaacctggacgtgtacgtgaacgtgccaaccagcacaagcgcctctggcctgacactgattggccctagcggcatgggcaagagcaccaacttcatcaacatcctgaatctgtacccgcaagtgattctgcaccccgagtactccacctaccagatcgtgtggctgaaggtggactgtcctcacgccggatctctgaagggcctgtgcaccgatatctttctgggcatcgacagactgctgggcaccaactacttcaagaagttcggcgccagccggaacagcgaggattatatgctggctcaggtggcccagatggcccacacacatcatctgggcgtgctggtcatcgacgagatgcagaatctggtcaccgccagacggtcctgcagcgatatgctgaacttcctggtcaagatggacaacatcatcggcgtgcccgtgatcagaatcggcaccaacgaggcctttccaatcctgcagggcaacttccggaatgccagaagaggaacaggcgagggcagcgtgatctgggacagaatgagaaacgacgacgagtggtacttcttcatggaaaccatgtgggagtaccagtggaccaagatcagcaccgacttcagcgacgagttcaacgacgtgttctacgatgagagccagggcatcatcgatatcgccatcaagctgtacaagatggtgcagtggcgggccatcagcctcggaggaaaagaagccatcaacgccaacctgatcaagcagagcgtgaaggacggcctgtttctggtcaagcccatgctgaacgccattcggagcggcgacaaagaatggatgatcaagtacaaggatatcgcccctatcgacacgacagagtactataacaactgcctgagcaacctcgagacaaaggacctgaaagagatcagcagactggccaagaagcagcaggccgagaacggacatctgagcgccacacagcggcacatcattctgaagctgctggaactggacgtggaaccccagctggccaaagaatgtgccgtgcaagtgatcaacagcggcgaagaggacgccgacattcccatcctggttaagcaggcctatgctctggcccttggcggacaggttcaagaggccaccgtgaagaaagtgcggacccacacactgaaggccaagcctaagtaccagatcaatgacatcagacagatcgccgagaaagccaagaagaaccagaccagcgcctacgagggactgaagtccaccggcatcatcaaggaccccgtgcaggatttcatcaccatcacctga

SEQ ID NO: 1003 - DNA, 639 bp, Homo sapiens
  source 1..639: mol_type = other DNA
atgatcgcccctctgatcctgtacctggacgtgcccttcaccaccttcagagagtctcacgccagagagatgggcaagacataccccgttcctccaccagccacagtgtacggcatgctgctgtctctcgtgggcgagacaaacgtgtacagacactgcggcgtggaactggccattgccatgctgagcagccccaagaagtcccggatcctgcggcagatgcggagattcaagaacgccgacttctctcaccccgagaacgtgatcccttgctaccaagagatcctgagcaacctgaagtgcctgatctgggtccgaagcgacgaggaaaagatccagcctagcctgagagagcggatccagctggcctttgatcaccctgaactcgtcagaagattcggctgcctgttcctgggcgagagcgaccagctgatcaagaccatcaagctggccagagaggactacctggaaggcgttagacagtgggccatccgggacaacagaggcagactgacactgccctattgggtcgaccacgtgggcagcagaaatacccggttcctgagataccggatcgaggaaatggaccggctgagccctcctgacctggcttggacaatggtgcagagccccatctga

SEQ ID NO: 1004 - DNA, 663 bp, Homo sapiens
  source 1..663: mol_type = other DNA
atgaccgccatcctgatccagagcgaggaatacgtggacctgaccttcaagctgagaggcgcccctattcctctggacaacggctacctgacatacgccgctctgagcagaatctgccctcctctgcacgaactgaagtccatcggcattcaccctatcgccggcattcccaccagaaacaacctgctggaactgacagcccagagccggctgaagatcagaatctaccaccagcagatccctctgatctacccctacctggccggacaggcctttcacatcggccagaacttctaccagctggacatccccgactacaagcccctgatcagcagcgagagcgtgtacagcagactggtcatcatcaagggcttccaggacagcaccaacttcatcgaggccgtgcagcggcagatggacaatctgggaatccagggcaagatcgagctgctgaccagacaggatggcacccctcagagaaggcagctgaccatcaacaaagagggcaagcagttcaaagtgcgcggcttcggcgtgaagatctccgagctgaaccctgaggacagcctgacactgcaagagcaaggcatcggcggcaagcggaagatgatgtgcggcatctttgtgcccgccaccagatccaaagaggaagaggaaacctga

SEQ ID NO: 1005 - DNA, 972 bp, Homo sapiens
  source 1..972: mol_type = other DNA
atgatgacccagaagaagaacgacagcaacatccccaactactacctgtacggcaccgtgctgaccagatacggactggccagcctgaaccacgacatcagaagaggcaacaagaccatcctgcagaaaggctactggaacaacggcaagatccacagcttcgtgggcagcagcgccattagatgggccctgaggttctatctgcagaaacagggctacctggtcaacagagtgtgggacgaagaggaacacatcaacagactgaccagcgaggacttcgaccccgagaagttctacgacgacgacatcttcggcttcgccctgctggaaagcgccgagacagaggaagataccagcaccaccaagcggaagaagaagcagaccaagaccagcacacccaaccagagaatgggcgccctgggcatgaatatggccgtgtctctgaccccttacgatggcgccgtgaagctgggagccaagtctggcagagagaaggacagcaccagcctgcacttcaccgagtaccacgccaccagataccagtactacttcggcatcgacgccacacacctgaaggacttcagccggatcctgcctatgatcgacggcatcatgaacctgcctaaagtcggcggcagcagcaatatcttcaactaccctttctgccccgacagcctggtgttccagtggaccaatcacttcgccagctacatcagctactgcttcgagtactgcgaccccaagagcaaagaggccaagctgagccaagagttcatcgacgaggtggaatgcggccagatcgaccctagcaaactgtggatcggcggcaccatcgtgaaggacctgcagcagctggacaacttcgagagcagccctctgaacaaggcccacatctaccggaaccggaacgagatgatcgaggccctgaaaaccgtgatcaagcgcgacctgggcctcgaggaatccaagtaa

SEQ ID NO: 1006 - DNA, 1581 bp, Homo sapiens
  source 1..1581: mol_type = other DNA
atgatcgtgtccacacagcccaagatcagcctgtctctgcacgccgccgataccaccatcatgcacagagtgggcatgaccggcctgtacatgaccctgaagcggctggaaaagcagtaccctctgagcagacagagaggcggccacatcagctggtttctgaccgccgacaccatcgagctgttttgggagggcagcgactttatcgccctgagctggctgatcaacgagagctttcagctggacgacaccggcctgatccacctcgttggcctggacaacgaccggatcgacctgagacagaagatccacatccacgagggaatctgcggcgtgttcctgcggctgaacaagttttaccaggccggcgagatcatcaacaccgagctgagattcgaagagaagcaggtcgagtaccagtacaagagcctgacttggtacgcccaccagaccttcgccgagaagctgtgcgaagccgatacacagcagctgcggcacgactacatccagatcaccagctggctgtacctcggcggaattgtgcggcatgccagaacacagaacaccaccaagctggaagagaaacccgagtacgccctggctctgctgtttgtgcctgtcgtgtgccactactgcctgctgcacatccctagcgaggacctgaaagagcggaagccccacagatacctggtggtcatccccgagatcaaggacttcgaggatgccagccagagaagatggcggctgcagcagctggaaacaaagcagttccacgtgtccagcctgggcgaagccggcctgctgtactacagcctggatgacattcagcccgaggtggcctactaccaggcctgtcaagtgtggctgtacgaaaagaccaacaaggccagccggcagcggaccctgatgagcatcgaggaaatcaagatcgacaagaacatcctcatcacctaccagcaggtccagaagtactttaagaccaactaccagatcattaagtacaagcagatcttcatcaaagtgaaccccattcggagcctgatcgccgacaatctggtcaagggaatccactggtggtccaatttctgggagaagctggtcatcgaggacagcaaagagtacctgttcaaccagctgttcagcaaccgcgagggcttcatcatcatggccgagaacagcgaagaggacaagcagtatctgatctttatcaaggtgttccagcaggccatgaagggcaacttcgccaagatctacgccaagaccgaggaaggcaaggaccctcctatcaagaaaaaggtggaacggctgcgggccgagctgaactactgttacgatgagctgagcttcaaagaatacctgagcgacttcctcgtcagaggcggactgaacaaatacttcaacgagcaccaagaggaaatcgccctgctgatcaagaagtccccttggcaagagatcagaatctggtccctgctggccattgccagctacaagcccaaggacaagctgaccaaccgggacgatagcagcctgagcaacaaccagaaactggaagaagtgaacgacgacagcgaggaagagtga

SEQ ID NO: 1007 - DNA, 990 bp, Homo sapiens
  source 1..990: mol_type = other DNA
atgaccatctacagcgagcactggtccctgaatcctctggaaatccctcagcggagccggctgtttagcctggaacctgtggctgtgggcacaccttatgccgagagcctgagcagctacctgcacagactggcccaggctcactgtctgacaagcgagaagctggtcatgggcgagatcgcccctctgatcctgaaggacgaggacaagagcgagctgctgagcaagaacctgagccatctgctgggcaacagcgacgccaagcctgccatcaatggcatgagagagatgaccgagaagctcgtgaccgtgctggaagaactgaccatgcggcaggacctgcggtttctgacactgctgtcttggaagggcatgatctacgacaagggcctgttccgcaactacagagcctggtgtccttgctgctgcgaggaatggatgcagaagaacaagacaatctacgagcccctgagctggtccttcaaggacgtggaattctgcctgatccacaagcagcggctgatcgaggaatgcagccattgtggcgctagactgcccgtgatggccagactttctcctgccggcttctgcagcagatgctatggctggctgggccaagagatcaagggcgaagaggaaatcgagaagtaccgcgtgaacatccagggcatctccgagctgattgccctgacacctcagctgggctacaagcccattcctatcgagctgacccggaaactgcagctgatcctgctggtgttcgagcaggccatcggcaaggatgtgaagctgctgggagatctcggcggcatcatggaaagcctgagaatcgccagcaccaccaaccagagccagccttaccacctggtcaagctgatcatccccgtgtgcgagaaggccaagatcagcgtgttccagctgttcggcagcgacttcaaagagctgggcaagatcctgtttggcaacttctccctggaactgaaactgtga

SEQ ID NO: 1008 - DNA, 2697 bp, Homo sapiens
  source 1..2697: mol_type = other DNA
atgaaggaacagttcgagcagtgggtcgcccggctgcagatttctgaagccggccagaaaatcatcgagaaagtgcggagcagcgagcccagcagaagagttggcggaggcagcaagaatgtgtccggcagatacccctccagaaagatgggcgtgaccatccagttcgagagccacagagtggaactgcccatcatctaccagctggaacacgacaaggacgtgctggaattctacgaccagcctcctcagatcaagctggactaccaggccagcaatggcagacgactgggagtgctgcacacccctgatctgttcgtgatcaggaccaatagcgccggctgggaagagtgcaagaccgagcaggatctgaagaagctggccgagaagaaccccaaccggtacttctacagcgaagagaacaaccagtggcacagcctgcctggcgaggtgtacgccaatcagtttggcctgtaccaccggatccacagcgaccgcgaaatcaactgggtgctgcagcggaacctgcagttcctggaagattactaccgcagcgagagcctggtggtggaagaggccattgctcagtctctgctggccatcgtgtctagccagcctggaattacactggccgagctgctgaacagaagcaccggcgccaagagcgacgacatctacaccctgatcatccaagagcagatctacatcgacctgaacgccacacctctggctgagcctgagagatgcctgatcttcagggatgagcagaccgccagcgcctacagactgatggttgagcagcctagcgtgtccctgcctgccatctctcccgtggtcaatattgtgacaggcgccaccgtgtcctgggatggcaagggcctgaatatcatccacgtgggcgagacagaagtgatcctgggcgccgagaacaatcagctcatcgaactgaagaaggccatcttcgagaacctcgtgcggcagggcaagatcacctctctgcagaccccagagaaaaccgccatcagcacagagagctggcagcggtttcatcaggcctctccagaggatcaggccgaggctctggaacggtacaagaccatcgagccctacctgaacggacaccctcctgagaacgagacaatccccgccagaaccatcagacactggaaggccaagtacctgatcgccatccagaagtacggctgcggctatatcggcctgctgtcccacagaagcgtgaagggcaacagacagagaaagctgcccgaggacaccctggccatcatggaaaagttcattctcgaggactacgagacactgaagcagaaacggatgtgggaagtgcacgccgctctcgtgcgagcttgtgaagaagcaggcgttatcgcccctagctacaaggccttcaccaaagaggtgcagcggagaaccggctacgagcagaccaagaagagacaaggcagaagggccgcctaccagcacgagtccttttactgggaactcgccatcaccacacctcggcacggcgatagacctttcgagatcggccacatcgaccacaccgagctggatgtggaactcgtgtgtagcgacaccggcagaaacctgggtagaccttgggccacctttctggtggacgcctactctagaaggctgctggccgtgtacctgaccttcgacagcccaagctaccggtcctgtctcatggtgctgcggatctgcgtgaagaggcatggcagactgcctcagatcgtggtggtcgataatggcgccgagtttcacagcgtgtacttcgaaaccctgctggctaccttcgagtgcaccaagaagcagcggcctccagccaaggccagatttggcagcgtgtgcgagagactgttcggcaccagcaacacccagttcgtgcacaacctgctgggcaatacccagatcacccggaacgtgcggcaagtgaccaagagcgtgaaccccaagaacctggctgtgtggacactgggactgctgtacgagtacctgtgtgcctgggcctacgaagtgtacgataccgacgaacaccccgctctgtttcagagccctagggatgcctttgccgccggaatggctatcggcggatctcgggtgcacagaatgatcccttacgacgagaacttccagatcctgacactgcccaccacctccgagggcaaagccaaggtgcaagtcggcagaggcatcaagatcaactacatctactactggtccaacagcttcagggacccacagatcgagaacaccagcgtgcagatcagatacgaccccttcaacatcggaatcgcctacgccttcgtcagaggccagtgggtgcagtgcatcagccagtactacgccgaactccagggcagaagcgagaaagagctgaaactggccagcatcgagctgcggaagcactacagcaatcacacccagcagagcaaggtgtccgccaaaaacctggccgagttcctggcaagcgtggaagctcaagaagccctgctggaacagagaagctacgacgccgaagtgaaagaggtgttccgggtcatcgaaggcggcaaggccacaaccagcagaaatgaggaacccaagctgatccaagtgaccttcgccaacaccgacttccaggccgatgaggacgaagccatcgtgcctgaaacactggtggtgtacgaggaattctga

SEQ ID NO: 1009 - DNA, 1152 bp, Homo sapiens
  source 1..1152: mol_type = other DNA
atgaccaagagcaccggctttccactggaactgctgaccagacctgccaccgagagactggcctacttcgagaactacaccgtggctcaccccagactgaaagaggtgtacgagatcctgatgcggacaatcgccgaacctgccggcgctagcttcatctttgtgtatggcgctagcggcgtgggcaagaccacactgagactgagagtggaacagaagctgaccgagctggccctgcctaagctggaaagcgatagagccagagtgcccgtcgtgggcattgaggctattgcccctgagagccggtacttcaactggaaagagtactacacacgggccctgatcaccctggaagaacccctgatcgaccacaagttcgactatggcgtgcggggcatcagcagagacaacttcggcaagatcaacgtggaaagcaaggtggtggcccctgctctgagaagggccctcgaaaatgccctgatccacagacaccccgacgtgttctttgtggacgaggcccagcactttggcaaggtggcctctggctacaagctgcaggatcagctggactgcctgaagtccctggccaacatgacaggcatcctgcactgtctgctgggcacctacgagctgctgaccttcagaaatctgagcggccagctgtctcggcggagcgtggacatccacttcagaagatactgcgccgactctcccgaggacgtgcaggcctttaaaagcgtgctgctgacattccagcagcatctgcctctggccgagacacccaatctggtggatcactgggagtacttctacgagagaaccctgggctgcatcggcaccctgaaggactggctgaagagagtgctgagcgacgccctggatagagaggccacaaccatcacactgaaggacctgcagaaaagggccctgagcgtggcccagtgccagaagatgttcaaagagatccaagagggcgaacgccagctgagcgaaacagaggccgatgtgcagaacctgagatctgcccttggcctgggagccaagcctatcgttctgcctgaggaaacccctaagaccaccagacctccaggcaaagtgggcaaaagaaagcccaagagggaccccatcggagtgcagcaggatgtgtcttga

SEQ ID NO: 1010 - DNA, 639 bp, Homo sapiens
  source 1..639: mol_type = other DNA
atgatcgcccctctgatcctgtacctggacgtgcccttcaccaccttcagagagtctcacgccagagagatgggcaagacataccccgttcctccaccagccacagtgtacggcatgctgctgtctctcgtgggcgagacaaacgtgtacagacactgcggcgtggaactggccattgccatgctgagcagccccaagaagtcccggatcctgcggcagatgcggagattcaagaacgccgacttctctcaccccgagaacgtgatcccttgctaccaagagatcctgagcaacctgaagtgcctgatctgggtccgaagcgacgaggaaagaatccagcctagcctgaaagagcggatccagctggccttcgatcaccctgaactcgtcagaagattcggctgcctgttcctgggcgagagcgaccagctgatcaagaccatcaagctggtgtccgaggactacctggaaggcgttagacagtgggccatccgggacaacagaggcagactgacactgccctattgggtcgaccacgtgggcagcagaaatacccggttcctgagataccggatcgaggaaatgcctagcagccctcctccttacctggcctggaccatgattcagagccccatctga

SEQ ID NO: 1011 - DNA, 663 bp, Homo sapiens
  source 1..663: mol_type = other DNA
atggccgtgatcctgatccagagcgaagagtacatcgacctgaccttcaagctgagaggcgcccctattcctctggacaacggctacgtgatctacagcgccctgagcagaatctgccccatcctgcacgagctggaatccatcggcattcaccctatcgccggcattcccaccagaaacaacctgctggaactgacagcccagagccggctgaagatcagaatccaccaccagcagatccctctgatctacccttacctggccggacaggcctttcacatcggccagaactactaccagctggacatccccgagtacaagcccctgatcagcagcgagagcgtgtacagcagactggtcatcatcaccagcttccaagagccgatcaacttcatcgaggccgtgcagcggaagctggacaacaagggaatcgagggcaagatcgagctgctgaccagacaggatggcacccctcagaagagacagctgaccatcaaccagaagggcaagcagttcaaagtgcgcggcttcggcgtgaagatctccgagctgaaccctgaggacagcctgacactgcaagagcagggcatcagcggcaagcggaagatgatgtgcggcatcttcgtgcccgccaccagatccaaagaggaagaggaaatctga

SEQ ID NO: 1012 - DNA, 957 bp, Homo sapiens
  source 1..957: mol_type = other DNA
atgagccagaagaagtccgacaacaacatccccaactactacctgtacggcaccgtgctgaccagatacggactggccagcctgaaccacgacatcagaagaggcaacaagaccatcctgcagaaaggctactggaacggcaagatccacagcttcgtgggcagcagcgccattagatgggccctgaggttctatctgcagaaacagggctacctggtcaacagagtgtgggacgaagatgagaacatcaacagactgaccagcgaggacttcgaccccgagcagttctacgacgacgacatcttcggcttcgccctgctggaaagcgccgagacagaggaagagacaagccctcctaagcggaagaacaagcagaccaaggccagcacacccaaccagagaatgggagccctgggcatgaacatggccgtgtctctgacaccttacgatggcgccgtgaagctgggagccaagtctggcagagagaaggacagcaccagcctgcacttcaccgagtaccacgccaccagataccagtactacttcggcatcgacgccacacacctgaaggacttcagccggatcctgcctctgatcgacggcatcatgaacctgaccaaagtcggcggcagcagcaatatcttcaactaccctttctgccccgacagcctggtgttccagtggaccaatcacttcgccccttacatcagctactgcttcgagtactgcgaccccaagagcaaagaggccaagctgacaaaagaattcatcgacgaggtggaatgcggccagatcgaccctagcaaactgtggatcggcggcaccatcgtgaaagagctgcagcagctggacaacttcgacaacagccccttcaagaaggcccacctgtaccggaacagacacgagctgatcgaggccctgaaaaccgccatcaagagagatctgggcctcgactga

SEQ ID NO: 1013 - DNA, 1581 bp, Homo sapiens
  source 1..1581: mol_type = other DNA
atgatcgtgtccacacagcccaagatcagcctgtctctggatgccgccgacaccaccatcatgcactgtgtgggaatgaccggcctgtacatgaccctgaagcggctggaaaagcagtaccctctgagcagacagagaggcggccacatctcttggagcctgaccgccgataccatcgagctgttttgggagggcagcgactttgtggccctgagctggctgatcaacgagagcttcaagctggacgacaccggcctgattcatctggccggcctggacaacaacgccatcgatctgtctcagaaggtgcacatccacaagggaatgtgcgccgtgttcctgcggcacaaccagttttatcaggctggcgagctggtcaacaccgagctggaagtggaagagaagaaggtcgagtaccagtacaagagcctgacttggtacgcccaccagaccttcgccgagaagctgtgcgaagccgatacacagcagctgcggcacgactacgtgcagatcacaagctggctgtacctcggcggaattgtgcggcatgccagaacacagaacaccacaaagctggaagaaaagcccgagtacgccctggctctgctgtttgtgcctgtcgtgtgccactactgcctgctgcacatccctagcgaggacctgaaagagcggaagccccacagatacctggtggtcatccccgagatcaaggacttcgaggatgccagccagagaagatggcggctgcagcagctggaaacaaagcagttccacgtgtccagcctgggcgaagccggcctgctgtactatagcctggacgatatccagcctcaagtgggctactaccaggcctgccaagtgtggctgtacgaaaagaccaacaaggccagccggcagcggaccctgatgagcatcgaggaaatcaagatcgacaagaacatcctgatcacctaccagcaggtccagaagtactttaagaccaactaccagatcatcaagtacaagcagatcttcatcaaagtgaacctgattcggtccctgatcgccgacaacctggtcaagggaatccactggtggtccaatttctgggagaagctggtcatcgaggacagcaaagagtacctgttcaaccagctgttcagcaaccgcgagggcttcatcatcatggccgagaacagcgaagaggacaagcagtatctgatctttatcaaggtgttccagcaggccatgaagggcaacttcgccaagatgtacgccaaggccgagagcggcaagtaccctcctatcaagaagaagatcgaacggctgcgggccgagctgaactactgctatgatgagctgagcttccaagaatacctgagcgacttcctcgtcagaggcggactgaacaagtacttcaacgagcaccaagaggaaatctccctgctgatcaagaaaacccactggcaagagctgcggatctggtccctgctggccattgccagctacaagcccaaggacaagcccaccaacatggacgacagcagcttccccaacaaccagaaggtggaagaagtcaactacgagagcgaggaagagtga

SEQ ID NO: 1014 - DNA, 990 bp, Homo sapiens
  source 1..990: mol_type = other DNA
atgaccatctacagcgagcactggtccctgaagcctctggaaatccctcagcggagccggctgtttagcctggaacctgttgctctgggcaccccttacacagagagcctgagcagctacctgcacagactggcccaggctcactgtctgaccagccagaaactggtcatgggcgagatcgcccctctgatcctgaaggacgaggacaagagcgagctgctgagcaagaacctgagccatctgctgggcaacagcgacgccaagtctgccatcaacggcatgagagagatgaccgagaagctggtcaccgtgctggaagaactgaccatgcggcaggacctgcggtttctgacactgctgtcttggaagggcatgatctacgacaagggcctgttccgcaactacagagcctggtgtccttgctgctgggaagagtggatgcaggacaacaagacaatctacgagcccctgagctggtccttcaaggacgtggaactgtgcctgatccacaagcagcggctgatcgaggaatgccctcattgtggcgctagactgcccgtgatggccagattttctcctgccggcttctgcagcagatgctatggctggctgggccaagagatcaagggcgaagaggaaatcgagaagtaccgcgtgaacatccagggcatctccgagctgattgccctgacacctcagctgggctacaagcccattcctatcgagctgacccggaaactgcagctgatcctgctggtgttcgagcaggccatcgagaaggacgttaagctgctgggctatctcggcggcatcatggaaagcctgagaatcgccagcaccaccaaccagagccagccttaccacctggtcaagctgatcatccccgtgtgcgacaaggccaagatcagcgtgtcccagctgttcggcagcgacttcaaagagctgggcaagatcctgtttggcaacttctccctggaactgaaactgtga

SEQ ID NO: 1015 - DNA, 2697 bp, Homo sapiens
  source 1..2697: mol_type = other DNA
atgaaggaacagttcgagcagtgggtcgcccggctgcagatttctgaagccggccagaaaatcatcgagaaagtgcggagcagcgagcccagcagaagagttggcggaggcagcaagaatgtgtccggcagatacccctccagaaagatgggcgtgaccatccagttcgagagccacagagtggaactgcccatcgtgtatcagctggaacacgacgaggacgtgctggaattctacgaccagcctcctcagatcaagctggactaccaggccagcaatggcagacgactgggagtgctgcacacccctgatttcttcgtgatccggaccaatagcgccggctgggaagagtgcaagaccgagcaggatctgaagaagctggccgagaagaaccccaaccggtacttctacagcgaagaggacacccagtggcactgtcctccaggcgagctgtacgccaatcagttcggcctgtactaccggatccacagcgaccgcgagatcaactgggtgctgcagagaaacctgcagttcctggaagattactgccgggccaagttcctggccgtggaagaagccattgctcagagcctgctggccatcgtgtcaagccagcctggaattacactggccgagctgctgaacagatccaccggcgtgaagtccgacgacatctacaccctgatcacccaagagcagatctacatcgacctgaacgcctctccactggctgagcctgagagatgcctgatcttcagggatgagcagaccgccagcgcctacagactgatggttgagcagcctagcgtgtccctgcctgccatctctcccgtggtcaatatcgtgaccggcacactggtcaactgggacggcaagggcctgaacatcatccacgtgggcgagacagaagtgatcctgggcgccgagaacaaccagctgatcgagctgaagaaggccatcttcgagaacctcgtgcggcagggcaagatcacctcactgcagaccccagagaaaaccgccatcagcacagagagctggcagcggttttaccaggcctctccagaggatcaggccgaggctctggaacggtacagaaccatcgagccctacctgaacggacaccctcctgagaacgagacaatccccgccaggaccatcagagactggaaggccaagtacctgaccgccatccagaagtacggctgcggctatatcggcctgctgtcccacagaagcgtgaagggcaacagacagagaaagctgcccgaggataccctggccatcatggaaaagttcattctcgaggactacgagacactgaagcagaaacggatgtgggaagtgcacgccgctctcgtgcgagcctgtgaagaaagcggagtgatcgcccctagctacaaggccttcaccaaagaggtgcagcggagaaccggctacgagcagaccaagaagagacaaggcagaagggccgcctaccagcacgagtccttttactgggaactcgccatcaccacacctcggcacggcgatagacctttcgagatcggccacatcgaccacaccgagctggatgtggaactcgtgtgtagcgacaccggcagaaacctgggtagaccttgggccacctttctggtggacgcctactctagaaggctgctggccgtgtacctgacattcgacagccccagctaccggtcctgtctgatggtgctgagaatctgcgtgaagcggcacggcagactgcctcagattgtggtggtggataacggcgccgagtttcacagcgtgtacttcgagactctgctggctaccttcgagtgcaccaagaagcagcggcctccagccaaggccagatttggcagcgtgtgcgagagactgttcggcaccagcaacacccagttcgtgcacaacctgctgggcaatacccagatcacccggaacgtgcggcaagtgaccaagagcgtgaaccccaagaacctggctgtgtggacactgggactgctgtacgagtacctgtgtgcctgggcctacgaggtgtacgataccgatgaacaccccgctctgtttcagagccccagggatgcttttgccgccggaatggctatcggcggctctagagtgcaccggatgatcagctacgacgagaacttccagatcctgacactgcccaccaccagcgagggcaaagccaaggtgcaagttggcagaggcgtgaagatcaacagcatctactactggtccaacagcttcagggaccctcagatcgagaacacctccgtgcagatcagatacgaccccttcaacatcggaatcgcctacgccttcgtcagaggccagtgggtgcagtgcatcagccagtactacgccgaactccagggcagaagcgagaaagagctgaaactggccagcatcgagctgcggaagagaagctctaatcacgcccagcagtctaaggtgtccgccaaaaacctggccgaattcctggccagcgtggaagctcaagaagccctgctggaacagagatcctacgacgccgaagtgaaagaggtgttccgggtcatcgaaggcggcaaggccacaaccagcagaaatgaggaacccaagctgatccaagtgaccttcgccaacaccgacttccaggccgatgaggacgaggccattgtgcctgaaacactggtggtgtacgaggaattctga

SEQ ID NO: 1016 - DNA, 1152 bp, Homo sapiens
  source 1..1152: mol_type = other DNA
atgaccaagagcaccggctttccactggaactgctgaccagaaccgccaccgagagactggcctacttcgagaactacaccgtggctcaccccagactgaaagaggtgtacgagatcctgatgcggacaatcgccgaacctgccggcgctagcttcatctttgtgtatggcgctagcggcgtgggcaagaccacactgagactgagagtggaacagaagctgaccgagctggccctgcctaagctggaaagcgacagatccagagtgcctgtcgtgggcgttgaagccgtggctcctgagagcagaaacttcaactggaaggactactacacacgggccctgatcgccctggaagaacctctgatcgaccacaagttcgactacggcgtgcggggcatcagcagagacaacttcggcaagatcaacttcgagagcaaggtggtggcccctgctctgagaagggccctcgaaaatgccctgatccacagacaccccgacgtgttctttgtggacgaggcccagcactttggcaagatggccagcggctacaagctgcaggatcagctggattgcctgaagtccgtggccaacatgaccggcatcctgcactgtctgctgggcacatacgagctgctgaccttcagaaacctgagcggccagctgtctcggagaagcgtggacatccacttcagacggtactgcgccgacaacagcgaagatgtgcaggccttcaagagcgtgctgctgacattccagcagcagatgcccctgagcgagtaccctgatctggtcacccactgggagtacttctacgagagaaccctgggctgcgtgggcatcctgaagaactggctgacaagagccctgaaggacgccctggatagagatgccaccaccgtgacactgaaggacctgcagaaacgcgcttggagcgtggcccagtgccagcggatgttcaaagagatccaagagggcgaaagacagctgagcgagacagagacagacgtgcagaacctgagatctgcccttggcctgggcgccaagacaattgcccaacctgaggaagcccctaagaacaccagacctccaggcaaagtgggaaagagaaaccccaagagggaccccatcggagtgcagcaggatgtgtcttga

SEQ ID NO: 1017 - DNA, 639 bp, Homo sapiens
  source 1..639: mol_type = other DNA
atgacagcccctctgatcctgtacctggatgtgcccttcgccaccttcagagagtctcacgccagagagatgggcaagacataccccgttcctccaccagccacagtgtacggcatgctgctgtctctcgtgggcgagacagacgtgtacagacactgcggagtggaactggccattgccatgctgagcatccccaagaagtcccggatcctgcggcagatgcggagattcaagaacgccgacttctctcaccccgagaacgtgatcccttgctaccaagagatcctgagcaacctgaagtgcctgatctgggtccgaagcgagggcgagaagatccagcctagcctgagagagagaatccagctggccctggatcaccctgaactcgtcagaagattcggctgcctgttcctgggcgagagcgaccagctgatcaagagcatcaagctggtgtcccaggactacctgcagggcgtcagacagtgggtcatcagagacaacagaggctggctgaccctgccttactgggttgaccacgtgggcagcagaaatacccggttcctgagataccggatcgaggaaatccctagcagccctcctcctgacctggcctggacaatgattcagagccccatctga

SEQ ID NO: 1018 - DNA, 663 bp, Homo sapiens
  source 1..663: mol_type = other DNA
atggccgctctgctgatccagagcgaggaatacgtggacctgaccttcaagctgagaggcgcccctattcctctggacaacggctacgtgatctacagcgccctgagcagaatctgccccatcctgcacgagctggacaacatcggcattcaccctatcgccggcattcccaccagaaacaacctgctggaactgacagcccagagccggctgaaagtgcggattcaccaccagcagatccctctgatctacccctatctggccggacagaccttccacatcggccagaatagctaccagctggacatccccgactacaagcccctgatcagcagcgagagcgtgtacagcagactggtcatcatcaccggcttccaagagcctaccaacttcatcgaggccgtgcagcggaagctggataacaagggcatccagggcaagatcgagctgctgaccagacaggatggcacccctcagaagagacagctgaccatcaacaagcagggcaagcagttcaaagtgcgcggctttggcgtgcggatcagcgagctgaatcctgaggatagcctgacactgcaagagcagggcatctccggcaagcggaagatgatgtgcggcatcttcgtgcccgccaccagatccaaagaggaagaggaaacctga

SEQ ID NO: 1019 - DNA, 969 bp, Homo sapiens
  source 1..969: mol_type = other DNA
atgatgagccagaagaagaacgacaacaacatccccaactactacctgtacggcaccgtgctgaccagatacggactggccagcctgaaccacgacatgcggagaggcaacaagaccacactgcagaaaggctactggaacggcaagatccacagcttcgtgggcagcagcgccattagatgggccctgaggttctatctgcagaaacagggctacctggtcaacagagtgtgggacgaagatgagcacatcaaccggctgaccaacgaggacttcgaccccgagcagttctacgacgacgacatcttcggcttcgccctgctggaaagcgccgagatcgaggaagagacaagcaccaccaagcggaagaagaagcagaccaagaccagcacaccccaccagagaatgggagccctggccatgaatatggccgtgtctctgaccccttacgatggcgccgtgaagctgggagccaagtctggcagagagaaggacagcaccagcctgcacttcaccgagtaccacgccaccagataccagtactacttcggcatcaacgccacacacctgaaggacttcagccggatcctgcctgtgatcgacggcatcatgaacctgcctaaagtcggcggcaacagcaatatcttcaactaccctttctgccccgacagcctggtgctgcagtggaccaacaatttcgccagctacatcagctactgcttcgagtactgcgaccctcagagcaaagaggccaagttcacccaagagttcatcgacgaggtggaatgcggccagatcgagccttctcagctctggatcggcggcaccatcgtgaaggatctgcagcagctggacaacttcgacgacagccccttcaagaaggcccacatctaccggaaccggaacgagctgatcgagaacctgaaaaccgtgatcacccggaacctgggcctcgaggaatccaagtaa

SEQ ID NO: 1020 - DNA, 1578 bp, Homo sapiens
  source 1..1578: mol_type = other DNA
atggtggccacacagcccaagatcagcctgtctctggatgccgccgacaccaccatcatgcacagagttggaatggccggcctgtacatgaccctgaagcggctggaaaagcagtaccccagcagcagacagagaggcggccacatttcttggagcctgaccgccgataccatcgagctgttttggcagggcagcgactttgtggccctgagctggctgatcaaagagagctttcagctggacgacaccggcctgatccacctgacaggcctggacaacgacgccatcaacctgagccagaagatccacatccacgagggaatctgcgccgtgttcctgcggctgaacaagttttaccaggccggcgagatcgtgaacaccgagctgacagtggaagagaagaaggtggaataccagtacaagagcctgacttggtacgcccaccaggcctttgccgagaagctgtgcgaagccgatacacagcagctgcggcacgactacgtgcagatcacaagctggctgtacctcggcggaattgtgcggcatgccagaacacagaacaccaccaagctggaagaaaagcccgagtacgccctggctctgctgtttgtgcctgtcgtgtgccactactgcctgctgcacatccctagcgaggacctgaaagagaaaaagccccacagatacctggtggtcatccccgagatcaaggacttcgaggatgccagccagagaagatggcggctgcagcagctggaaacaaagcagctgcacgtgtccagcctgggagaagccggcctgctgtactacagcctggacgatattcagcccgagggcgactactaccaggcctgccaagtttggctgtacgagaagatgaaccaggccagccggcagagaaccctgatgagcatcgaggaaatcgagatcgacaagaacaccctgatcacctaccagcaggtccagaagtactttcagcccaactatcagaagatcgagtacaagcagatcttcatcaaagtgaaccccattcggtccctgatcgccgacaatctggtcaccggaatccactggtggtccaacttttgggagaaactggtcatcgaggacagcaaagagtacctgttcaaccagatcttccccaaccgcgagggcttcatcagaatggccgagaacagcgaagaggacaagcactacctgatctttatcaaggtgttccagcaggccatgaagggcaacttcgccaagatgtacgccaaggccgaggacggcaaggaccctcctatcaagaaaaaagtggaacggctgcgggccgagctgaactactgttacgatgagctgagcttcaaagagtatctgagcgacttcctcgtcagaggtggcctgaacaaatacctgaaccagaatcaggccgagatcctgctgctgatcaagaagctgccctggcaagagctgagaatctgggccctgctggccattgccagctacaagcccaaagagaagcccatcagcaaggacgacagcctgacactgaacaaccagcagctcgaagagatgaacgacgagagcgaggaagagtga

SEQ ID NO: 1021 - DNA, 1008 bp, Homo sapiens
  source 1..1008: mol_type = other DNA
atggtcaaccccagaggcatgaccatctacctggaacactggaacctgaagcctctggaaatccctcagcggagccggctgtttagcctggaaccagtggctgtgggcacaccttatgccgagagcctgagcagctacctgcacagactggcccaggctcactgtctgaccagccagaaactggtcatgggcgagatcgcccctctgatcctgaaggacgaggacaagagcgagctgctgagcaagaacctgagccatctgctgggcaacagcgacgccaagcctaccatcaacggcatgagagagatgaccggcaagctggtcaccatcctggaagaactgaccatgcggcaggacctgcggtttctgacactgctgtcttggaagggcatgatctacgacaagggcctgttccgcaactacagagcctggtgtccttgctgctgggaagagtggatgcgcgagaacaagacaatctacgagcccctgctgtggtccttcaaggacgtggaattctgcgtgatccacaagcagcggctgatcgaggaatgccctcactgtggcagcagactgcccatcatggccaagtttagccctgccggcttctgcagcagatgctatggatggctgggccaagaagtgaagggcgaagaggaaatcgagaagtaccgcgtgaacatccagggcatctccgagctgattgccctgacacctcagctgggctacgagcctattcctatcgagctgacccggaaactgcagctgatcctgctggtgttcgagcaggccatcggcaaggatctgaacctgctgggcgatctgggcagaatcatggaaagcctgcggatcgccagcaagaccaaccagaaccagccttaccacctggtcaagctgatcatccccgtgtgcgagaaggccaagatcagcgtgtcccagctgttcggcctggactttcaagagctgggcaagatcctgttcggcaatttctccctggaactgaaactgtga

SEQ ID NO: 1022 - DNA, 2703 bp, Homo sapiens
  source 1..2703: mol_type = other DNA
atgaaggaacagttcgagcagtgggtcgcccggctgcagatttctgaagccggccagaaaatcatcgagaaagtgcggagcagcgagcccagcagaagagttggcggcggaagcaaaaatgtggccggcagataccccagccggaagatgggagtgaccatccagttcgagagccacagagtggaactgcccgtgatctaccagctggaacacgacgaggacgtgctggaattctacgaccagcctcctcagatcaagctggactaccaggccagcaatggcagacgactgggagtgctgcacacccctgatctgttcgtgatcaggaccaatagcgccggctgggaagagtgcaagaccgagcaggatctgaagaagctggcccagaagaaccccaaccggtacttctacagccaagaggacaaccagtggcactgccctccaggcgaagtgtacgccgatcagttcggcctgtactaccggatcagaagcgacaaagaaatcaactgggtgctgcagcggaacctgcagttcctggaagattactaccgcagcgagagcctgggcgtcgaacaggctattgctcagtctctgctggccatcgtgtctagccagcctggaattacactggccgagctgctgcatcagcagacaggcgccaagagcgacgacatctacaccctgatcgtgcaagagcagatctacttcgacctgaacgccgctcctctggctgagcctgagagatgcctgatcttcagggatgagcagaccgccagcgcctacagactgatggtggaacagcccaacgtgtccctgcctgccatctctcccgtgatcaatatcgccaccggcacacccgtgtcctgggatggaaagggcctgaacatcatcctcgtgggcgagacagaagtgatcctgggcgccgagaatgaccagctgatcaagttcaagaaaaacgtgttcgaggaactcgtgcggcagggcgagatcacatctctgcagaccccagagaaaaccgacatcagcaccgagagctggcagcggttttaccaggcctctccagaggatcaggccgaggctctggaacggtacaagaccatcgagccctacctgaacggacaccctcctgagaacgagacaatccccgccagaaccatcagagactggaaggccaagtacctgacagccctgcagaagtacggctgcggctatatcggcctgctgtcccacagaagcgtgaagggcaacagacagagaaagctgcccgaggacaccctggccatcatggaaagattcattctcgaggactacgagacactgaagcagaaacggatgctggaagtgtatggcgccctggtgctggcttgtgaacagagcagtgtgatcgcccctagctacaaggccttcaccaaagaagtgaagcggcggaccggctacgagcagaccaagaagagacaaggcagaagggccgcctaccagtacgagagcttttactgggagctgacccagaaaacaccccggcacggcgatagacctttcgagatcggacacatcgatcacacccagctggacgtggaacttgtgtgctccagaaccggcagaaacctgggcagaccttgggccacctttctggtggatgcctactctagaaggctgctggccgtgtacctgaccttcgacagcccaagctaccggtcctgtctgatggtgctgcggatctgcgtgaagaggcatggcagactgcctcagatcgtggtggtggacaatggcaccgagttccacagcgtgtacttcgaaaccctgctggctaccttcgagtgcaccaagaagcagcggcctccagccaaggccagatttggcagcgtgtgcgagagactgttcggcaccagcaacacccagttcgtgcacaacctgctgggcaatacccagatcacccggaacgtgcggcaagtgaccaagagcgtgaaccccaagaatcaggccgtgtggacactgggactgctgtacgagtatctgtgcgcctgggcctacgaggtgtacgacacagatgaacaccccgctctgtttcagagccccagggatgcttttgccgccggaatggtcacaagcggcagcagactgcaccggatgatcccttacgacgagaacttccagatcctgacactgcccaccaccagcgagggcaaagccaaggtgcaagttggcagaggcgtgaagatcaacagcatctactactggtccaacagcttcagggacccacagatcgagaacaccagcgtgcccaccagatacgaccccttcaacatcggaatcgcctacgccttcgtcagaggccagtgggtgcagtgcatcagccagtactacagccagctgcagggcagatccgagaaagagctgaagctggctagcgccgagctgagaaagagaagcagcaactacggcagacagagccaggtgtccgccaagaacctggccgaatttctggccagcgtcgaggcccaagagacactgctggaacagagaagctacgacgccgaggccagagaagtgttcatcgtgatcgaaggcggcaaggccgccaccagcagaaatgagcagcctaagctgatccaggtgccgtttgagaacaccgacacacaggtggccgaggacgaggccattacacctgaaacactggtggtgtacgaggaattcagcctgtga

SEQ ID NO: 1023 - DNA, 1152 bp, Homo sapiens
  source 1..1152: mol_type = other DNA
atgacccagaccaacggcttccctctggaactgctgaccagacctgctcctgagagactggcctacttcgagaactacaccgtgggacaccccagactgaaagaggtgtccgagatcctgatgcggacaatcgctgaacctgccggcgctagcttcatcttcgtgtatggacctagcggcgtgggcaagaccacactgagactgagagtggaacagaaactgaccgagctggtgctgcccctgctggaatctgatagaggcagagtgcctgtcgtgggcgttgaagctgtggcccctgagagcagaaacttcaactggaaggactactacacacgggccctgatcgccctggaagaacctctgatcgaccacaagttcgactacggcgtgcggggcatcagcagagacaacttcggcaagatcaacgtggaaagcaaggtggtggccccagctctgagaagggccctcgaaaatgccctgatccacagacaccccgacgtgttctttgtggacgaggcccagcactttggcaagatggccagcggctacaagctgcaggatcagctggattgcctgaagtccctggccaacatgaccggcatcctgcactgtctgctgggcacatacgagctgctgaccttcagaaacctgagcggccagctgtctcggagaagcgtggacatccacttcagacggtactgcgccgagaatcccgaagatgtgcaggccttcaagagcgtgctgctgactttccagcagcagatgcctctggccgaggctcctgatctggtgtctcactgggagtacttctacgagagaaccctgggctgcgtgggcatcctgaagaactggctgacaagagccctgaaggacgccctggatagagaagccaccaccgtgacactgaaggacctgcagaaacgcgcttggagcgtggcccagtgccagcggatgttcaaagagatccaagagggcgaaagacagctgagcgagacagagacagacatccagaacctgagatctgccctcggcctgggagccaagcctattgtgctgcctgaggaaacccctaagaccaccagacctccaggcaaagtgggcaaaagaaagcccaagagggaccccatcggagtgcagcaggatgtgtcttga

SEQ ID NO: 1024 - DNA, 627 bp, Homo sapiens
  source 1..627: mol_type = other DNA
atgatgacaatcgccctgaaggtggaagtgcctatcgcctgcttcagacagagccgggccagagagtacgccgagacatatcctgtgcctccacctagcaccgtgtacggcatgctgctgtctctgatcggcgagacagaccggtacaagcactgtggcacacagctggccattgctctgctgagcaagcccgagaagtccatcgtgatccggaccttcagacggttcaagaccaaggacatccaccatcctaagaacgccaagcctgactaccaagagctgctgaccaacatcgagttcgtcgtgtgggtcaagaccgacaaggccaagcctacactgcctgagctgctccagcaggcctttgccaatcctgccagcatcaacagattcggcggcctgtgtctgggcgagagcagagatctggtcaacaccgtgacactgctgcccgagaattaccacggcgagtctctgtggtggctggtcacagacgaggatggcagtctgaccctgccttactgggttgaccacgtgggcagcaagagaaccagatggcagtgctacgagctgcaagagtcccaagtgtggcagcctcctgatctgagctggaccaccatccagaccagctga

SEQ ID NO: 1025 - DNA, 702 bp, Homo sapiens
  source 1..702: mol_type = other DNA
atggtggtggattgcagcctgcctacacagatcctgagcgagagccctctgaacctgaccaagcctaccgaggtgctgacccctcatctgccctacatcgacctgatcttcaacctgatcggcgagacagtgcccctggatcacggctacgagctgttttctgctatcgcccacttcgagcccgagctgcacaagctgaataccgtgggcatcaacacaatcgccggcattcccaaagagggcgtcatccagctgaccaagaacagcagactgcggatcagactgcccgtggatcaagtgcggctggtgtatcctctggccggcaagtctctgaagatcggcaagcacaccatccggctgggcatccctgagatctacctgctggaacctgccgagcggctgagaagcagaatcgtgatcatccagagctaccaagagcctgagagcttcctggccgctgctcagagacagctggaaaagctgggaatccagggcaaagccttcatcaccaagaataccgacggcagccccaagcggcggagcatcaagatcaagagattcaccgtcgtcggcttcggcctggaaatcatcaacctgagcgacgaggactctctgaccctgctgagatatggcatcggcggcaagagaaagatgggctgcggagtgttcgtgcccgtgaagagaaagggcaacgccagctaa

SEQ ID NO: 1026 - DNA, 975 bp, Homo sapiens
  source 1..975: mol_type = other DNA
atgttccacctgttcggcaacatcctgaccagctatggcaccgccgccaacaacagaggcgagaacgagggcaatatcacccctctgcagaagctgaactggaagggcgaagtgcacaccctggtgtcctctgaggccattagatgggccctgcggtactactggcagaacgtgggctaccccgtgaacagaagatgggacgaaaacgcccagcctgtggccgatcatgtgtggcaggaccccaacttcgacgacatccggttcatcgacgacgacgtgctgggctttatgcaggccgaagccgccaaagccgaagcctctgatgagtctgaaggcgaggccgaggaagccagccagaacgagaacaagaagatcagcaagggcaaagacaagcagacaagccccagaaagggcaagcagaagcccaagggcaagatcacagctcggagaggcgtgctggaagtgaccagagccgtgtctatgatccccttcaccggcgacatcaccttcaatgccgtgtccggcgtgaagggcagaaacagcctgtacgccacagagatccacgccaccagataccagtacggcttcgccctgacacctgacagcctgaaggacaagtctagaatccacgccgtgctggacggcctgatctctattggagaggtggccggcaaccacgccagatttctgtacgatttcagccccgagagcatcgtgctgagatggaccgatgacttcagccctcggttcctgtactgcttcgagcaggacgagctgggcaatctgagcgtgtccaaccttgtgcgccaggtggaagtgggcgacatcgaccctaaagagctgtggatcggcggactgatctctcagggactcgaagatctgggcgccaacgtgttccctggcgtgaagtctgctgtgaaggccctgaagcaagtgatcgccgaggatctgcagctgagcagcggctctgattga

SEQ ID NO: 1027 - DNA, 1536 bp, Homo sapiens
  source 1..1536: mol_type = other DNA
atgtctgtggtggccagcgtggtcaaccccaagatccaactgaacctgggcgaccccagcatcacctggattcacagagccggaattgccggactgtggatgaccctgaagcagctggaaaagctgtaccccattcctgccgagaggcccggcaatctgacctggtttctgacccacagatccatcagcctggaatggcagggccaagacttcgtggtgctggactggctgctgaagcagagcttccagatcaacgaggaaggcctgatcagcctgaccggcctgaatacccacagcatcaacatcgagacacggatcaacatccacctgggaatcaccggcacctttctgcagcacaaccaggtgttcaagttcgacggcggcaagagctggtccctgatcgtggatggcatcgagatcgatgtcgagtacaagaaggccgtcagctacgcccaccagcactttgccaagcagctgtgcgataagcagggccagctgctgggacagtctattggagtggccggctggctgtatcctggctctgttgttagacacgtggccttcaccaaagagacacgcttcgaggaaaagccccagctggccttcgctctgctgtatgctcctgtggcctgccactacttcgtgctgagaagccacaccaagcctgagcacacacagtacgccctggtcatccctgaggtggtggacctggaaatctacgcccaagagtactggaacctggaaaacctggactacaaggacttcaacgtgtcctctctgggcgacgccgctctgagatacctgacctacgagacaatcatcgagctggctatccccgaccaagtgaagcggtgccaagtgatcctgttcggcaccgtcgtgtggtccaagcagcagaaaacccggatcgagattgccgtggtggaagccaccggcatcatcaacttcatctacaagctgagcggcatcagcttccccgagtaccagatcatccagtataagaacaagaacttcatcatcagcaacctgttccggggcacaatcgccgacaatctggtcaagggctttccttggtgggccaacctgtacaccatcttcaagaacaagtccctgtttaagttcatcaccaacgacggcgcctacaagatgatccagaacagcgagtggaatctcgagagccagaagctgttcatcaaggcctgtcacgaggccctgaagaagatctacgccaaaatctacggccggaccaacgagggccagtatgcccagatcgagagagagaacatccggatcctgtctcagctgggcagatgcaccaacgccgagaacttcagaaagtttatcgccgagttctggggcagagccggccagctgtctatcctggaaaaacactgggaagaactgctgcccctgacctctggcatcatggattggaaggtggcccgggacctgacctttatcgccctggccagctatcccaagagcaacatggtggaaaagcagatcctcgagatccccgacagcaactccgagtga

SEQ ID NO: 1028 - DNA, 951 bp, Homo sapiens
  source 1..951: mol_type = other DNA
atgctgagcttcttccccacactgtaccccgacgagctgctgtactctagcctggccagataccacatcagaagcggcaacaagagcttcaagcagaccgacctggaactgttcggctacagcagccagcaagtgtgcaaagtgaccctgaccaacaacgtgaactacctggtcaagaacttcccactgcggagccagcagaccgtggacaacctgctgcagaaccacactctgtaccccttctacgccaccttcctgatgcctcaagaggcttggctgctgaaggacagcatgagcaagaagctgagcggcagcatcctggaaatcgccaaagtggccacaggcagcagcggcgagagcaagaatttcctgaagttctgccccggctgcctggaaaaggacacacagcagtacggcgagccctactggcacagaacacaccaggtgccaggcatcctcgtgtgtcctacacatggcgtggtgctgtgggatagctgtgtggccctggaaagcaagggcatccactactatgccgccagcgtgtacaactgcctggtcatcaccgacgtgaaaagcttcaccaatcaggccctgcggaccctgctgacactgaccagcgatatcaatctgctgatccacagcaacttcaccttcaaaggcctggcctggctgagaacccagtaccagagatacctcgtgaacaagggcctgctccagatcttccctggcggcaagctgaagttcgacgagtacgccttcagcaagctgatcttcgacttctacggccaagagagcctggaagccctgaatcctaagctgacccagcaccagggcaagtacttcagccattgcctgctgggctgcgatctgaaccctgccgtggatagaatcacccatatcctgatggtcaagttcctggccaacagcatcgaggcattcttccaagagtga

SEQ ID NO: 1029 - DNA, 819 bp, Homo sapiens
  source 1..819: mol_type = other DNA
atggccagaagcaagcaggattggacccaggccaagttcgagcgctacctgaaagaaggcagaggccaaggcagcggcaagggctatcagccctggatcaagattcaggacttccccagcaagggcagagtgtccagacctcctggctggaaaacaaacagagagcaccatctgctgagcgacaacgagaagcggctgttctacgtgttcgagtggagcgacaccatcgtggacatcagagagcagttccctctgatcgacctggacctggccatgtctatcgccgaggaaatcggcatcaactaccccaaggatcccgagagcaacaccgccagagtgctgaccaccgacttcatgctgtctgtgaagcagggcaagaaaatcgtgcagaaggcccggaccttcaagctgaccaaggatctgggcagcaagagcgtggccgagaagtttgagctggaaaagcggtactacgccgccaagggcatcgactggggaatcatcaccgagaaagaggtgcccaagcagctggccgaaaacgtggaatgggtgcacaccgcctacaagctggaagagaacgccgacatcaacctggaagaactgcgggatatcgccaacatcctgaagtcccggctgcaagagagcgacgccaatatcaaccggatcaccaccgacctggataagaacatgaacatcgagagcggcaccagcctgtacctgttcagacacctgatcgccaagaaagaaatcatcatggacatgctggccaccaagatcagcagctgtcctagctctggcgccatcaaaaagatcatcctgtga

SEQ ID NO: 1030 - DNA, 2238 bp, Homo sapiens
  source 1..2238: mol_type = other DNA
atgagcaacgacctgttcgtgaacgacctgatcgagtggatcgacgagagcggcaacagcttcatcgagcgggtgctgtggatcgatgagggctacatcattgccttcgtgttcaacatcaacaccaagaccggctttcccgagcctaagaaagtgtccgagatcgtggaagccatcagcaacggctctgccctgaagctgaagtctgacccctgggccagaatcgtgaccgaagaggacctgagcgagaaagagaaagagctgcgggacagagcctgggagatcatctccttcatcgtgatccaagagccgagcatctactaccgggactacagaggtgctctggtgcagcagaccatcgagaagtacaacaccggccgcagcaagggcaagctggtggaaatcagcgtgtacaagtacctgcggcggttctggcagcggggcaagaacaaaaatgccctgctgcctgactacgtgaacagcggcggaaagggaaagcctaaggccagcggcgagaagaagagaggcagaccccggaaatacgtgcacgaccaagagatcggcatcggcatcaacgtgaccgaggaagatcgcaagatcttcagattcgccattgccaagttctacaacaacagcaaagagaacttcctgaccaccgcctacgacctcatgatcaaagagtactacagcgaggacttctactacgacgagaacggcgtgaagaagtccatcctgattcctccagacaagcggcccaccttcacacagttcaagtattggtacgaggtggaacagagcgacatccgcaagaccatcatcagccggaagggcagcattaagtacgccctggaacacagagccatcaccggcaccagccagatggaaacaatcggccctggcagcagataccagatcgacgccacaatcgccgacgtgtacctgatctccatgtacaaccggaactggatcatcggcagacccgtgatctacgtgatcatcgacgtgttcagcagaatgatcaccggcgtgtacgtgggcctcgagggaccttcttgggctggtgctatgatggccctggccaatagcgccaccgacaaagtgaagttctgccaagagtacggcgtggaaatctccggcgacgagtggccttgtagacacatccccgataccatcctgggcgacagaggcgaactcgtgggcatgaaggtggaaacactgatccccaacctggacgtgcggatcgagaatgccgctccttacagagccgactggaaaggcctggtggaacggcagttcagaaccatccacggctacgtgaagcccttcgtgcccggctacatcgacaccgactttagacagagaggcggccacgactacagactggacggcagactgaacatcgatgagtttaccaagatcgtgatcttcctgatcctgcagcacaacaaccacgattacctgaccaaatacgcccgggacgagatgatgatcacagacgacgtgaaccccattcctcgcgagctgtggcagtggggaatcgccaatagaagcggcaggctgagaacattccccgaggacatcgtgaaactgaacctgatgcctgccgagaaggccaccatcacagccagaggcatcaagtttaagggcatgtactacacgtgcgagaaagcccggaaagagttttggttcgagaagtccagaagcagcctgctgagcaagagcgagaagtctctggacatcagctacgacatccggcagagcaagtacatctacctgagaagccccaacggccgggactttgagaagtgcttcctgctggaaagcgagcagagatacctggacaagaacctgtacgacatcgagtacctgttcgcctacgaggaactgcagcggcagaagcaccagggcaagagactgcaagagaaggtggacctgattgccaacatcgagagcatcgtgtctaaggccaaagaggacaccgaggccgtcctggacgacaacaccagcaacagacagaaggtggccggcatcagagagaaccgggccttcgagaaggaccggcggagaaagaatgagggcttcgagctggccaaagaagagatcaccaacagcacagaggccaccaacaacaaagtcaacacccagagcgaggacctggaaagctccaagctgctgaagcccgaccacatggatctgctgcggcggaagagacaagagcgcaagagaggcgaggactga

SEQ ID NO: 1031 - DNA, 1668 bp, Homo sapiens
  source 1..1668: mol_type = other DNA
atggaaaagatcgagggcgagctggtcatgatccccaatggcaagtctgccatcgtggcccggtacatcgatcagaagctgcccgagtacaacacgaaccctctgattcaggccctgcctcctatcctgagcagcgaggaattcatcgacaaagtgaccagaacacccgacttcgacgagcaagagagacagctggaagcccactaccggttccactgcatcgagcggctgagcagatacttcgaccctcagaacaagaccgtggaactgcagaaagtgatcaacgtgctgatcatgacaggctatctggcccggaacattctgacccctgactacgccaacagaagccggcagatctacaacgccatcaaggacggcggaggcaagaacctgcagagctacgtgaacctgcctaccagcgcctctggcctgacactgattggacctagcggcatgggcaagagcaccaacctgcacaacatcctgaatctgtacccgcaagtgattctgcaccccaactacagcgtgtaccagatcgtgtggctgaaggtggactgccccaagacactgaagggcctgtgcaccgacatcttcatgaccatcgaccagctgctgggcaccacactgttcaacaagttcaacagcagccggtccagcgaggactacctgctggctcaactggcccagattgcccacacacaccacctgggcgtcgtcgtgatcgacgagatccagaacctggtcaccaccagaagaagccgggacgagattctgaacttcctggtcaagctggacaacatcatcggcatccccgtgatcagagtgggcaccaatgaggccatcagcatcctgcagggcaacttccggaacgccagaagaaataccggcgagggcagcgtgatctgggacagaatgatcaacgacgatgagtggtgcttcttcctggaaggcatgtgggagtacaagtggaccaagactcccgtgttcctgtccgatgagatcaaagaggtgttctacgaggaaagccagggcatcatcgatatcgccgtgaagctgtacaagatgctgcagtggcgggccatctccatcggcggcaaagagatcatcaccaccgagctgctgcggaaggtggccaaggatggcctgtacctcgtgaagcctatgctggacgccatccgcagcggcgacaaagaatggatgatcaagtacaaggatatcgcccctctggataccaccgagtaccagaacaagtgcagaagcgagctggaaagcaaggacctgcaagagatcagacggctggccagaaagcagcagacctaccagaaggtgtcccctaagctgaactacgtgatcctggaactgctgaagctggaagtggaacccgccaaggccaaagaatgcgccgagcaagtgatcgtgtccagcgacgaggacgccgatatcaccctgctgaccaagaaggcctacacactggctctgcaaggcggccaagtgaacgagtctctggtcaaggccaacatcagcaaggccaagctgaagcccaagtaccagggcaacgacatccggggcatcgtggaaaacgccaagaaagagaagaagttcgcctacgacgacctgaaactggccggcatcatcaagaaccccgtggaagatttcatcaacatctga

SEQ ID NO: 1032 - DNA, 633 bp, Homo sapiens
  source 1..633: mol_type = other DNA
atgaccacaatcgccctgaaggtggaagtgcctatcgcctgcttcagacagagccgggccagagaatacgtggaaacataccccgtgcctccacctagcaccgtgtatggcatgctgctgtctctcgtgggcgaagtggaccggtataagcactgtggcgtgaagctggccattgctctgatcagcgagcctgccaagagcaccgtgatccggaccttccaccggctgaaaacaaagaacattcacgaccccaagaacaacaagcccgactaccaagaggtgctgaccaacatcgagttcgtcgtgtgggttgacgctggcgtggacaaggccaagcctaacctggtgcagagactggaagaggccttcacaaaccccggcagcatcaacagattcggcggcctgtgtctgggcgagagcagagatctggtcaacgacatcaccctgctgcctaagaactactacgccgagagcatgcggtggctgatcagggatgagtacggcctgctgaccctgccttactgggttaaccacgtgggcagcagaggcaccagatggctgagctacgagatccaagagtgccaggtgctgcagcctcctgagctgtcttggacaagcgtgcagagcgactga

SEQ ID NO: 1033 - DNA, 669 bp, Homo sapiens
  source 1..669: mol_type = other DNA
atgggcgatcacttccacctgagcacccagaaccacgtgaaggacgtgctgaaccctcagctgatctacgtggacctgagcttcagagtgatcggccagacactgcccatcgatcacggctacggactgtacgccgctctgacccatctgcaggataagctgcacagcctggacgacctgtccatccagacaatccctggcatccccgacggcaaggacagcctgaacctgaacaaccacagcagactgcggatcagactgcccgtggaaaagatccctctggtgtaccctttcgccggcaagagcctgacaatcggccggcacaagatccggctggaaatccctcagatgtacctgctgcaggccgtcgagaagctgcggtctagaatcgtggtcatcaagggctacgaggaacccgacgcctttctggctgctgcccagagacaactggaacggctgggaatccagggaatcgccagcattcctaccaaggccgatggcaagcccaagcggagatccatcaagatcaagaagttcaccgtcgtcggcttcggcctggaagtgaccaacctgagcaacgaggacagcatcaccctgcagaagtatggcgttggcggcaagcagaaaatgggctgcggagtgttcgtgcccgtgaacgagaagagatga

SEQ ID NO: 1034 - DNA, 996 bp, Homo sapiens
  source 1..996: mol_type = other DNA
atgagccacctgttcggcaacatcctgaccatctatggcaccgccgccaacaacagaggcgagaacgagggcaacatcaccacactgcagaagatcaactggaagggcgaagtgcacaccaccgtgtctgccgaggctattagatgggccctgcggtactactggcagaacaacggctacgaagtgaatcggagatgggacgagaacgcccagcctctggccgatcacattctgcaggacctgaacttcaacaacgtgcggttcatcgacgacgacgtgctgggctttatgcagacagaggccgccagagtggaagccggcgatcaatctggcggagaggtgcaagaagcctctgccggcgagatccagaacgtgtcccaggatgaggaagtgaccagcagcaagggcaagcgcaagaaaaccagccagcggaagggcagagaaagaccccagggaagagtggccgctaaaaggggcgtgctggaagtgacaagagccgtgtctctgatcccctatgaggggaatatcaccttcaacgccgtgtccggcaagaaaggcagaaccagcctgtacggcacagaggtgcacgccaccagataccagtacggctttgccctgacacctaacagcctgcaggacaagagcagatccaatgccgtgctgaacggcctgatcagcatcggcgaagttggcggcaaccacgccagatttctgtacgacttcagccccgacagcatcatcctgagatggacccacgatttcagccctcggttcctgtactgcttcgagcaggacgagtggggcaatatcagcgtgccagatctcgtgcggagagtcgaggccgaggacatcgatcctaaagagctgtggatcggcggagccattgccagagatctgggaaacctgggcgccaacgttttccccggcgtgaagaaagtggtggaagaactgctgaaagtgatcacccgggacctgcagctgctgcccagatcttaa

SEQ ID NO: 1035 - DNA, 1533 bp, Homo sapiens
  source 1..1533: mol_type = other DNA
atgatcaacaccaccgccaacagcaagatccagctgaacctgggcgagagcagcaccacactgctgcacagagctggaatcgccggcttctggatgaccctgaagcagctggaaaagatctaccccaatcctgaccagcggaccggcaatctgacatgggtgctgaccccttacagcatcagcctgaactgggaaggccaggacttcgccgctctggattggctgctgaagcagagcttccagatcagcgacgagggcctgatctctctgatcggcagcaatctgcaggccatggacatcgagcggcagatcatcatccaccagggaatcaccggcacctttctgcagcacaaccagttcttcaagagcagcggcaagaagctgaagtccatcatcgtggacagcaagaaattcgtgaccgagtacaagagcgccatcagctacgcccaccagcacttcgccatcaagctgtgtgatgagagcggccagttcctgcaagagcccatcggaatcgtcggctggctttatcctggcgccgttgtgcggcactacgccttcaaagagcagacccagttcgaggaaaagcccgagtacgctctggccctgctgtttgctcctgtggcctgccactacttcatcctgcggagccacacaaagccccagagcaccaactacatcctgctggtgcccgaagtgaacaacctggaactgtacgcccagtactgctggaacctgagcaacctgtcctaccgggacttcaacgtgtccagcctgagagaggccggactgaagttcctgaccacacagacagccgtgcaagtgaaccagaactgcgtgaagcggtgccaggtgttcagctttggcaccctgatttggagcgagcagcagaaagtgcggaccgagatcgccacactgaagctgacagagaaggtgtccttctactacaagctgagcagaagctgcttccccaactaccggatcgtgtactacggcaatcagcacttcattctgaccagcctggtgcagggcatcattgccaacaatctcggcctgggactgccttggtggaacgactttggcaacaagctgaccagctccaacctgttcaaccagatcgccgacgagagacagggcatctacaccatgatccaagagttcgagtgggatatcgagagccagaagctgttcatcaaggcctgtcacgaggccctgaaagtgacctacgccaagatctacagccggaccaaagagaacgaatacgcccagatcgagcgcgagaacaccaagatcatcagccagctgggcagatgcaccaacgccgagaacttcagaaagtttatcgccgagttctggggcaaagccggccagctgtctatcctgcagaagcactgggaagaactgctgcccatcaccaccggcatgatgaactggaagatggcccgggacctgacctttatcgccattgccagctatcccaagacgcagaacatcaagccagagagcagcgagatcagccagacctcctctgagtga

SEQ ID NO: 1036 - DNA, 948 bp, Homo sapiens
  source 1..948: mol_type = other DNA
atgctgagcttcttccccacaccttatcctgacgagctgctgtactctgccctggccagataccacatcagaagcggcaacaagaccttcaagcagaccgacctggaactgttcggctacagctctcagcagctgtgcaaagtgaccctgaccaacaacctgaactacctggtcaagaacctgagcctgttcagccagctgaccgtgtccgacctgctgcagaactacacactgtaccccttctacagcacctttctgatccctcagcaggcctggcagctgcaggacagcatgagaaacaagctgagcggcagcatcctggaagtggccaaggtggccaatcatcccaccgagaacagcaccaagtttctgaagttctgccccgtgtgcctgaagaaggacacccaagagtacggcgagccctactggcaccggatccatcagatccctggcatcctcgtgtgccccacacacagaatcatcctgcacgatagcagcgtggccgtggactctaagggcatccattatcatgccgccagcctggaaaactgcctgtgcaaccagaatcaagtgaagtacaccgacagcaccgtggaaaagctgctgattctggcccaggacatctgggacaccagcaacatcaacatcagcttcaaaggcctggcctggctgcggaaccagtaccagagctacctgatcaaccagaaattcatgaacatcctgcctggcggcaagttccggttcaatcagaagtccttcagcaacagcatccgggactgctacggccaagaggtgctggaaatcatcaaccccaatctgatcaagaaccccgacaagtacttcagcagctacctgctgggctgcgatctgaaccccgtgatcgacagaatcacccatatcctgatcatcaagttcctcgccaagagcgtgaaaaccttcttcacctga

SEQ ID NO: 1037 - DNA, 819 bp, Homo sapiens
  source 1..819: mol_type = other DNA
atggtccgtgggagaagagagtggacccaggccaaatacgagcggtacatcaaagaaggccgcggaagaggcagcggcaagcagtataagccttggctgaccatccaggacgtgcccagcaagggcagaagctctagaacacccggctggaaaacaaaccgggtgcaccacttcttcagcgaccacgagaagcggctgttctacctgttcgagtggagcgacatcgtgaccgacatcagagagcagttccctctggacgacctggacctggccatgtctatcgccaccgacatggacatcaagtaccccgtggataccaagagcggcaccccttacgtgctgaccagcgactttatgctgaccgtgaacagagatggcaagcagatgcagatcgcccggaccgtgaagcctagcaccgagctggaaaagaaaagagtgaacgagaagctggaaatcgagcggcagtactacctggccaagggcatcgagtggggcatcatcaccgagaaagagatccccagactgctggtggaaaacgtggaatgggtgcacagcgcctacagactggaagccaatcctgagatgaacacagcccagctgagagagctgagcaccatcctgaagtacaagctgcaagaagaggacaccgccatcaacaccatcacaagcgccctggacaaagagatgaatatcagctacggcaccagcctgtacgtgttcaagcacctgatcgctatcaaagaagtgatcgtcgacctggtcaagatcaagctgagcgcctgtcctagcaccaaggtgttcgagaaagtgatcttctga

SEQ ID NO: 1038 - DNA, 1566 bp, Homo sapiens
  source 1..1566: mol_type = other DNA
atggtcaaagagtactacaaagagggcatccgctacgacgagaacggcgtgcagaagtccatcctgacacctaccgacaagatccccaccatcacacagttcaagtactggtatcagctggaacaggacgacgtgaccaagacactgaccagcagaaagggcgccaagagagtggccctggaaaacagagccatcctgggcaccagcaagatggaaacaatcggccctggcagcagataccagatcgatgccacagtggccgacgtgtacctggtgtccaagtacaaccggaactggatcatcggcagacccgtgatctacgtgatcatcgacgtgttcagcagaatgatcaccggcgtgtacgtgggcctcgagggaccttcttggacaggcgctatgatggccctggccaatgtggccgctgacaagaccctgttctgccaagagtacaacatcaacatcaccgaggacgagtggcccagcaaccagatgcctgatgccattctgggcgacagaggcgaactggccggaatgaaggtggaaacactgatccccaacctgtacgtgcggatcgagaatgccgccagctacagagccgattggaaaggcctggtggaacggcacttccggatcatccacgagcacgtgaagccttttctgcccggctacgtggacaccgacttcagacaaagaggcgccagagactaccggctggacggcaagctggacatcgatcagttcaccgagatcatcgtgcggctgatcgtgcaccacaacaacaagtttctgaaagagtacgagcgcgacgaggccatggtggccgatgacattcctcctattcctcgcgagctttggagatggggcatcaccaacagaagcggcagactgagaaccttcagcgaggacatcgtgaagctgaacctgatgcctaccgagaaggccacaatcaccgccaagggcatcaagatgcggggcaaagagatgtactatacctgcgacagcgccgagaaaggccagtggttcgagaaagccagaagcaacctgctgagcaagagcgacaagagcctgatcgtgtcctacgacaccagaaatcccaacttcatctacctgcctagcagcgacggccgggacttcgagaagtgcttcctgatcgatagcgagggcagatacgccaacaagaacttctacgacatcgagtacctgctggcctacgaggaactgcagagacagaagtctcagggccagcagctgcaagagaaggtggacctgatcgccgatatcgagagcatcgtggacaaggccgagcagatgaccgatgccgctcaagagcccaatctgtctaagacaaagaaggtgtccggcatcagagagaaccgggccttcgaaaaggccaagcggagagactctgagggcttcgagctggccattaccgagaaccagagcagcttccaagtgatcgagtccaagagcgagacaagcgagcagcccgaaagcctgcagcctaaccacctgaatctgctgaagaagaagaggcaagagcgcaaaagaggccaggacagaggctga

SEQ ID NO: 1039 - DNA, 1671 bp, Homo sapiens
  source 1..1671: mol_type = other DNA
atggacagaatcgagggcgagctggtcaagatccccaatggcgaactggccgtgatcgcccggtacatcgatcagaagctgcccgagtacaacgtgaaccctctgatccaggctctgccccacatcctgagcgccgaggaattcatcgaccaagtgaccagaacacccgacttcaacgagcgcgagaaagagctggaaacccactaccggttccactgcatcgagcggctgagcagatacttcgaccctcagaacaagaccgtggaactgcagaaagtgatctgcgccctgatcatgaccggctacctggccagaaacatcctgaagcctgagtacgccagcagaagccggcagatctacaacgccattaagcacggcggaggcaagaacctggaaaactacgtgaacctgcctaccagcgccagcggcctgacactgattggaccatctggcatgggcaagagcaccaacttccagaatatcctgaatctgtacccgcaagtgattctgcaccccgactacagcgtgtaccagatcgtgtggctgaaggtggactgtcctcacgccggatctctgaagggcctgtgcaccgatatctttctggccgtggatagactgctgggcaccaactacttcaagaagttcggcagcagccggaacagcgaggactatatgctggctcaggtggcccagatcgcccacacacatcatctgggcgtgctcgtgatcgacgagatgcagaatctggtcaccgccagacggtccagcagcgatatgctgaacttcctcgtgaagatggacaacaccgtgggcatccccgtgatcagagtgggcacaaacgaggcctttccaatcctgcagggcaacttccggaacgccagaagaggaacaggcgagggctctgtgatctgggacagaatggtcaacgacgacgagtggtacttcttcatggaaggcatgtgggagtaccagtggaccaagaccttcgtgcccttcagcgacgagatcaacgaggtgttctacgacatgtgccagggcatcatcgatatcgccgtgaagctgtacaagatggtgcagtggcgggccatcagcatcggcgacaaagaaatcatcaccgtggacctgatccggcaggccgccaaggatggactgtatctggtcaagcccatgctggacgccattcggagcggagacaaagaatggatgatcaagtacaaggatatcgcccctctggacaccaccgagtaccagaacaagtgcctgagcgagctggactacaaggacctgaaagagatcagacggctggcccggaagcagcagaatcagcagcaagtgtcccctaagctgaattacgtgatcctggaactgctgaacctcgagatcgagcccgccaaggccaaagagtacgccgagaaaaccgtgtcctccgacgaggacgccgacattcctagcctggttaagaaggcctacgctctggctctgcaaggcggccaagtgaacgagaatctggccaagaccagcaccaagaaagtgaagtccaagccgaagtacaaagagaacgacatccggcggatcgtggaaaacgccaagaaagagaaaaagagcgcctacgaggatctgaagtccgccggcatcatcaagaaccccatcgaggactttatcaacaagtga

SEQ ID NO: 1040 - DNA, 627 bp, Homo sapiens
  source 1..627: mol_type = other DNA
atgacaacagtggccctgaaggtggaagtgcctatcgcctgcttcagacagagccgggccagagagtacgccgagacatatcctgtgcctccacctagcaccgtgtacggcatgctgctgtctctgatcggcgagacagaccggtacaagcactgtggcacacagctggccattgctctgctgagcaagcccgagaagtccatcgtgatccggaccttcagacggttcaagaccaaggacatccaccatcctaagaacgccaagcctgactaccaagagctgctgaccaacgtggaattcgtcgtgtgggtcaagaccgacaaggccaagcctacactggccgaactgctccagcaggcctttgccaatcctgccagcatcaacagattcggcggcctgtgtctgggcgagagcagagatctggtcaacaccgtgacactgctgcctgagaagtaccacagcgagagcctgtggtggctggtcacagacgaggatggaagcctgacactgccctactgggttgaccacgtgggcagcaagagaaccagatggcagtgctacgagctgcaagagtcccaagtgtggcagcctcctgatctgagctggaccaccatccagaccagctga

SEQ ID NO: 1041 - DNA, 717 bp, Homo sapiens
  source 1..717: mol_type = other DNA
atggtcaaagagatgagcagctacttcagcctgcctacacagacccctatcaccgagacactgacccagacataccccaaagagactctgacccctaagctgccctgggtcgagctgagattcagcatcatcggccagacaatccccgtggatcacggctacggcctgtactctgctatcgcccactttcagagccaggtgcacgacatcgataccctgggcatccacacaatcgccggcattccttctgaggacggccagatccacctgaccgacaacagcagactgcacatcagactgcccgtggacaagatctccctgatctatcctctggccggcaagagcctgaagatcggcaagcacacaatccggctgggaatccccgagatctacctgctggaacctgccgagagactgcggagcagaatcgtgatcatccagggctaccagaagcctgagagcttcctggctgctgcccagagacagctggaacagctgggcattcagggcaaagccttcatcaccaagaacaccgacggcagccccaagaggcggagcatcaagatcaagcggtttaccgtcgtcggcttcggcctggaaatcatcaacctgagcaacgaggacagcctgacactgctgagatatggcatcggcggcaagcggaagatgggctgcggagtgtttgtgcccgtgaagatcaagggcaacgccagctaa

SEQ ID NO: 1042 - DNA, 975 bp, Homo sapiens
  source 1..975: mol_type = other DNA
atgttccacctgttcggcaacatcctgaccagctatggcaccgccgccaacaacagaggcgagaacgagggcaatatcacccctctgcagaagctgaactggaagggcgaagtgcacaccatcgtgtccagcgaggccattagatgggccctgaggtactactggcagaacgtgggctaccccgtgaacagaagatgggacgaaaacgcccagcctgtggccgatcatctgtggcaggacctgaacttcgacgacatccggttcatcgacgacgacgtgctgggctttatgcaggccgaagccgccaaagtggaagcctctgatgagtctggcggcgacgctgaagaggctagccaggacgagaacaagaagtccagcaagggcaaagacaagcagacaagccccagaaagggcaagcagaagcccaagggcaagatcacagctcggagaggcgtgctggaagtgaccagagccgtgtctatgatccccttcatgggcgacatcaccttcaacgccgtgtccggcgtgaagcggagaaatagcctgtacgccaccgagatccacgccaccagataccagtacggcttcgccctgacacctgacagcctgaaggacaagagcagaatccacgccgtgctggacggcctgatctctattggagaggtggccggcaaccacgccagatttctgtacgatttcagccccgagagcatcgtgctgagatggacccacgacttcagccctcggttcctgtactgcttcgagcaggacgagctgggcaacatgagcatcagcaacctcgtgcgccaggtggaagtgggcgatatcgaccctaaagagctgtggatcggcggactgatctctcacggcctggaagatctgggcgccaatgtgttccctggcgtgaagtctgccgtgaaggccctgaagcaagtgatcgccgaagatctgcagctgagcagcggcagcgattga

SEQ ID NO: 1043 - DNA, 1536 bp, Homo sapiens
  source 1..1536: mol_type = other DNA
atgtctgtggtggccagcgtggtcaaccccaagatccaactgaacctgggcgaccccagcatcacctggattcacagagtgggaatcgccggcctgtggatgacactgaagcagctggaaaagctgtaccccattcctgccgagaggcccggcaatctgacatggcttctgacccctagatccatcagcctggaatggcagggccaagacttcgtggtgctggactggctgctgaagcagagcttccagatcaacgaggaaggcctgatcagcctgaccggcctgaatacccacagcatcaacatcgagactcagatcaacatccacctgggaattaccggcaccttcctgcagcacaaccaggtgttcaagttcgacggcggcaagagctggtccctgatcgtggatggcatcgagatcgatgtcgagtacaagaaggccgtcagctacgcccaccagcactttgccaagcagctgtgcgataagcagggccagctgctgggacagtctattggagtggccggctggctgtatcctggctctgttgttagacacgtggccttcaccaaagagacacgcttcgaggaaaagccccagctggccttcgctctgctgtatgctctggtggcctgccactacttcgtgctgagaagccacaccaagctggaacagacccagtacgccctggtcatccctgaggtggtggacctggaaatctacgcccaagagtactggaatctgggcaacctggactacaaggacttccacgtttccagtctgggcgacgccgctctgaagttcctgacctacgagacaatcgtggaactggctatccccgaccaagagaagcggtgccaagtgatgctgttcggcaccgtgatctggtccaagcagcagaaaacccggatcgagattgccgtggtggaagccaccgagatcatggacttcatctacaagctgtcccggatcagcttccccgagtaccagatcatcgagtataagaacaagaacttcatcatcagcaacatgttccggggcacaatcgccgacaacctggtcaagggatttccttggtgggccaacctgtacaccatcttcaagaacaaaaacctcttcaagttcatcaccaacgacggcgtgtacaagatgatccagaacgccgagtggaacctggaatcccagaagctgttcatcaaggcctgtcacgaggccctgaagaagatctacgccaaaatctacggccggaccaacgagggccagtatgcccagatcgagagagagaacatccggatcctgtctcagctgggcagatgcaccaacgccgagaatttccggaagtttatcgccgagttctggggcagagctggacagctgagcatcctggaaaaacactgggaagaactgctgcccctgaccagcggcatcatggattggaaagtggcccgggacctgacctttatcgccctggccagctatcccaagagcaacatggtggaaaagcagatcctcgagatcagcgacagcaacagcgagtga

SEQ ID NO: 1044 - DNA, 948 bp, Homo sapiens
  source 1..948: mol_type = other DNA
atgctgagcttcttccctcaactgtaccccgacgagctgctgtactctggactggccagataccacatcagaagcggcaacaccagcttccggcagaccgagattgagctgttcggctactacagccagcagatctgtagagtgatcctgcctagcaacctgaactacctggtcaacaacctgcctctgcggagcaagcagaccgtggaaaacatcatccagaaccacagtctgtaccccttctacgccacctttctgatccctcaagaggcctgggtcgtgcgcgagagcatgaagaagaagctgaacggcagcatcctggaaatggccaagatcgccttcaacagcaccgaccgggccaagaagttcctgaagttctgccccatctgcatggaagaggacacccagaagttcggcgaaggctactggcaccggttccaccagattccaggcgtgatggtctgcagcgtgcacaacagcgccctgtacgatagcagcgtgatcgtggaaacccggaacacccactaccatgccgcctctccagacaactgcatcctgaacaccaacacacggaactacaccgagggcaccctgcggaatctgatcgtgctggccagagaagtggaatggctgatctccaacaacatggacttcaaaggcctggcctggctgcggagccagtacaagcactacctcgtgaacaagaaactgatcacactgttccctggccggaagttcatcttcaaagagaaggacttcagcaagagcatcttcaacttctacggccagaacttcttcgagacaatcaaccagaactgcatcaagaaccccgacaagtacttctccaactgcctgctggcctgcgacatcaaccccgtgatcgaccggatcatccatatcctgatcatcaactttctggccaacagcctggaaaacttcttccggtga

SEQ ID NO: 1045 - DNA, 819 bp, Homo sapiens
  source 1..819: mol_type = other DNA
atggttcgaggcagaggcgaatggacccaggccaagttcgagcggtacagaaaagaaggccgcggaagaggcagcggcaaggactataagccctggatcaccatccaggacttccccagcaagggcagaagcagcagaacccctggctggaagtccaaccgggtgcaccactttctgagcgaccaagagaagcggctgttctacctgttcgagtggagcgacgtggtcaccgacaccagagagcagttccctctggacgatctggacctggccatgtctatcgccaccgagatgggcatcaagtaccccgtggatctgcagagcggcaccccttacgtgctgaccaccgatttcatgctgaccgtgaaccagaacggcaaacaggtgcagatcgcccggacagtgaagcagagcaccgagctggaaaagaaacgcgtgatcgagaagctggaactggaacggcggtactacctggccaagagcatcgattggggcatcgtgaccgagaacgagatccctagactgctggccgagaacgtggaatggatccacagcgcctacaacctggaagccaacagcgagatggacatccctcagctgcacgagctgggcaccatcctgaagtccaagctgcaagagcacgacaccgccatcaacagagtgaccaccgctctggacaaagagatgaacatcaagtccggcaccagcctgtacatgttcaagcacctgatcgccgccaagaaaatcatcatcaacatgctcgagacaaagatcagcgcctgtcctagcagcaaagtgattgagaagatcatcttttga

SEQ ID NO: 1046 - DNA, 2232 bp, Homo sapiens
  source 1..2232: mol_type = other DNA
atgcacgaggacctgttcatcaacgacctgatcgagtgggagagcgacggcaactctcagctgatcgagcggatcatctggatcgacgagggctacgtgatcgccttcgtgctggacatcaacagcaagaagggcctgcctgagcctaagaaggtgtccgagatcctggaagccatgagcgaaggcctggcctttaagcagaagcaggacccctgggccagaatcatccgggaagagaacctgaccgaccgggacaaagagtacagagacaaggcctgggagatcatcagcagcctggtggtgcaagagcccagcatctactaccggaacatcagaggcagcctcgtgcggcaagtgatcaagagctacaacgagggccgcgagaaggacaagctggtggaaagaaccgtgtacggctacatgcggcggttctggcagagaggcaagaccaagaacgctctgatccccgacttcatcaactccagcggcaagggcaagatccggggcgacagcaacaagaagagaggccggccaaagaagtacagctacgaccctgagatcggcgagggcgtgaacgtgaccgaagaggacagacggatcttccggatcgccatcagccggttctacaacaaccccaaagagaactacttcaccaccgcctacgagctgatggtcaaagagttctacaaagagggcgtccgctacgacgagaacggcgtgcggaagtctatcctgacacctaccgagaagatccccaccatcacacagttcaagtactggtatcagatcgagcagtacgacgtgaccaagacactgatcagccggatcggcgccaagaagttcgccctggaaaacagagccatcctgggcaccagcaagatggaaacaatcggccctggcagcagataccagatcgatgccacagtgggcgacgtgtacctggtgtccaagtacaaccggaactggatcatcggcagacccgtgatctatgtgatcatcgacgtgttcagcaggatgatcaccggcttctacatcggcctggaaggccctagctggatcggagctatgatggccctgacaaacgtggccgccgacaaagtgatgctgtgccaagagtacaacatcgatatcgccgaggaacagtggtcctgcaaccagatgcctgatgccattctgggcgacagaggcgaactggccggaatggctgtggaaccactgatccccaatctgtacgtgcggatcgagaacgccgccagctatagagccgattggaaaggcctggtggaacggcacttccggaccatccacgagtacgtgaagcctttcctgcctggctacgtggacaccgacttcagacagagaggcgccagagactaccggctggacagcaagctggatatcgatcagttcgccgagatcattatccgcctgatcatcttccacaacaacaagcccctgaacgagtacgagcgcgacgaggccatgatcgccgatgacgttccacctattcctcgcgagctgtgggagtggggaatcgccaatagaagcggcagactgagaagcttccccgaggacatcgtgaagctgaacctgatgcctacagagaaggccacaatcaccgccaagggcatcaagctgcgcggcaaggacatgtactacagctgcgaccaggccgagaaagagcagtggttcgagaaggcccggtccaacatgctgagcaagagcgagaagtccctgatcgtgtcctacgacatcagaaaccccaacttcatctacctgcctctggaagatggccggaacttcgagaagtgcttcctgatcgatcccgaaggccggtacatcaacaagaacttctacgatatcgagtacatgctggcctacgaggaactgcagcagcagaaaacccagggcaagaccctgcaagagaaggtggacctgattgccgacatcgagcacatcgtgtccaaggccgaaaacatgaccgaggccgctcaggatgagcccctgagcaagtctaagaaagtggccggcatcagagagaacagggccttcgagaaagccaagcggagagagaatgagggctttgagctggccaagaccgagacacctacaagcacagaggccgtggaaacaaacaacgagagcctgaagcctcctaagagcctgcagccaaaccacctggatatcctgaagcagaagagactggaacggaagcggggcagaaaagagtga

SEQ ID NO: 1047 - DNA, 1668 bp, Homo sapiens
  source 1..1668: mol_type = other DNA
atggacggcaagaacgagagagagtgggtcgagatccccaacggcgattgggccgccattgccaagtacagcgatcacaagctgcccgagtacaacatcaaccctctggtgcaggccctgcctcctatcctgagcagagatgagttcgtggaacgcgtgaccgaggtgcccgattacgatagcgtggaaaccgagctggaaccccagtaccggttccactgcatcgagcggctgagcagatacttcgaccctcagaacaagaccatcgagctgcagaaagtgatcgccgtgctgatcatgcagggctatatcgcccggaacatcctgaagcctgagtacaccagaagaagccggcagatctacgacgccatcaaggatggcggcggaaagaccctggaaaactacgtgtacgtgcccaccagcgcctctggcctgacactgattggacctagcggcatgggcaagagcaccaacctgctgaatattctgagcctgtatccgcaagtgattctgcaccccgagtataccaccttccagatcgtgtggctgaaggtggactgccctagaagcctgaagggcctgtgcaccgacatctttctggccgtggatagactgctgggcaccagctacttcaagaagttcggcagcagaggcaacagcgaggactacatgctggctcaggtggcccagattgcccacacacatcatctgggcgtgctggtcatcgacgagatgcagaacctggtcaacgccagacggaacagggacgatctgctgaacttcctggtcaagatggacaacaccatcggcgtgcccgtgatcagagtgggcaccaatgaggcctttccaatcctgcagggcaacttccggaacgccagaagaggaacaggccagggctctgtgatctgggagagaatgctgcaggacgacgactgggacttcttcctgaccggcatctgggagtaccagtggaccaagacacccgtggacttcagcgacgagatcaacgaggccttctactacgagtgccagggcatcatcgacattgccatcaagctgtacaagatgatccagtggcgggccatcagcctcggcggagatgagaagatcaccgtggacctgatccaccagtctgccaaggacggcctgtacctcgtgaagcctatgctggatgccatcagaagcggcgaccaggactggatgatcaagtacaaggatatcgcccctatcaacgccatcgagtacaagaacaagtgcctgtctgagctggaaagccgcgacctggaagaagtgcggagactggccagaaaacagcagaacaggggcaaccagagcgtgaagctgcggcacatcatcgtggaactggttaagctggacgtggaacccagcgtggccaaagaatgtgccgagaaggtgctggaaatcaatgaggacaacgccgacattcccagcctgctgaaagaggcctacatctacgcactgcagggcgagcctgtgaagaagggcaccgccaagaccaacatcagaaagaccaagcctaagtaccagagcaacgacatcaggcagatcgtggaaaacgccaagaacaaaaagaaccccgcctaccaggacctgaaggccgccgatatcatcaagaaccctctgcaggacttcatcaacatcgagtga

SEQ ID NO: 1048 - DNA, 633 bp, Homo sapiens
  source 1..633: mol_type = other DNA
atgaccacaatcgccctgaaggtggaagtgcccgtggcctgctttagacagagccgggccagagaatacgtggaaacataccccgtgcctccacctagcaccgtgtatggcatgctgctgagcatgatcggcgagatgaaccggtacacccactgtggcacacagctggccattgctctgctgagcgagcccaagaaaagcaccgtgatccggaagttccaccggttcaagaagctggacatcaacgaccccagcaacatcaagcccgactaccaagagctgctgaccaacatcgagttcgtcgtgtggatcattgccggcaccgacaagagcaagcccacactgcctgagagactgcatctggccctgaccaatcctgccagcatcaacagattcggcggcctgtgtctgggcgagagcagagatctggtcaacagcgtcagcttcttcagcgagaagtacgagggcgagtccttcgagtggctggtgcagaatgaggaaggcctgctgaccctgccttactgggttgaccacgtgggctctcagggcacaagatggcagcggtacatgctgcagaagtccctgggtagacagcctcctgagctgagctggacagtgatccagacagcctga

SEQ ID NO: 1049 - DNA, 693 bp, Homo sapiens
  source 1..693: mol_type = other DNA
atggccatcgactacagactgaccgtggacaactgctacaaagagacactggcctgtaccaaccggaaagagttcctgacctgccagctccagctgatctacgccgacctgagctttagagccatcggccagatcattgccatcgaccactgctaccacctgtacagcggcatcagcaagttccagcctaagctgcacgacagcaaggtcgtgcggatctgcagaatcaccggcaatcccgacaagttcggcaagctgcacctgaaccagaacagcagactgcggatcagactgcctgtggataagatccctctgttctacagcctggccggcaagagcctgagaatcggcgaggataccatccggctgagcatccctcagatcgagctgctgcagcctaccgagaagctgcggagcagaatcgtgatcatcaagcggtgccaagagcctcggagcttcctgaaagtggcccagagacagattgagcagctgggcatcaagggcaccgtgaacatccaggccaacttcgacggcacccctaagcggagaaccatcaaagtgaaagagagcaccctcgtcggcttcggcctggaagtgaagcacctgagcgaggaagatagcctgatcctgcaggcctacagcatcggcggcaagcacaagatgggctgcggcttctttgtgcccctgaagtga

SEQ ID NO: 1050 - DNA, 972 bp, Homo sapiens
  source 1..972: mol_type = other DNA
atgttccacctgttcggcaacatcctgaccagctatggcaccgccgccaacaacagaggcgacaacgagggcaatgtgacccctctgcagaagctggactggaagggcgaagtgcacaccaccgtgtctagcgaggccattagatgggccctgcggtactactggcagaacttcggctacctggtcaacagaagatgggacgagaacgcccagcctgtggccaaccacatcatgcaggaccacaacttcgacgacatccggttcatcgacgacgacgtgctgggctttatgcaggccgaagccgccaagatggaagcctctcacgagagcgagggcgaatctgaaggcgccagccaggacaacaacaagaagaacagcaagggcaaagacaagcagaccagcagacggaagggccagcagaaactgaagggcaagatcacagccagacggggcgtgctggaagtgacaagagccgtgtctatgatccccttcatgggcgacatcaccttcaacgccgtgtccggcatcaagaaccggaacagcctgtacgccaccgagatccacgccaccagataccagtacggcttcgccctgacacctgacagcctgaaggacaagtccagaatccacgccgtgctggacggcctgatctctattggagaggtggccggcaaccacgccagatttctgtacgatttcagccccgagagcatcgtgctgagatggacccacgatagcagccctcggttcctgtactgcttcgaagaggacgagcggcggaacatcaccgtgccagatcttgtgcggagagtggaagccggcgacatcgaccctaaagagctgtggattggcggagccatcagcaagaccctggaagatctgggcgccaacgtgttccctggcgtgaaagctctggtggaagccctgaagcaagtgatcgccgaggatctgcagctggccctgagatcttaa

SEQ ID NO: 1051 - DNA, 1605 bp, Homo sapiens
  source 1..1605: mol_type = other DNA
atgtgggtgttccggtccaccaagatcatcatccggaatcaagagaagttcaactgcatcagcaagaagtgctttcggaagcaccacagcatgtctatcgccaagagcagcgtgaagtcccggatcagactgaacctgagcgaccccagcctgaccagactgcatattgctggcgttgccggcctgtggatgacactgggacagctggaaaagctgtaccccgagagcgccaagaggcccagcaatctgacctggtctagaacccctcacagcatcagcctggactgggacggcgaagaggacttcatcgtgctggactggctgctgaagcagagcttcaagatcagcgacgagggcctgatcgatctgcctggcgtgaacagccagaccggcaacatccagaccaagattatcaagcacctggggatcagaggcaccttcctgcagcacaacaagtccttcaagagcgccggcaatgtgtccaccgtgctgatcgatgagatggaagccattgtgctgtacaagaaggtggacgagtacgcccaccaggtgttcgccaaacacctgtgcaacaagcagggccagctgctgcaagagcctatcggcatcgttggctggctgtatcctggcgccgtgatcagacacgaggtgttcagagaggaaacaaagttccacgagaagcccgagctggctctggctctgctgtttgctcctgtggcctgccagtactttgtgctgggcagccacctggaaagagagaagccccacttcatcctggtcatccctcaagtgaccgacctggaagcctacgctcagcactgctggaacctgaccgatctggacttcgactacttccacgcctcttctctgggcgacgccggcctgagatttctgacctacgagacaaacgtgcagcagaccgccttcaatcccgtggaaagatgcctcgtgatcctgttcggaaaggccgcctggtccaagcagcagaaaaccagaaccgagacagcctttctgcaggccagcgagacagtgaacagcgtgtacaagctgagctgcatattcttcccgaactaccagaacttcaagtccaagaacgagacacccatcattgccaacatcctgcggggcattatcgccgacaacctggccaattctctgccctggtggttcaacctgagcaccaaggtgcaggacaactacctgctcgagctgagcaacgacgacaaccagggcatctacaagatgatcagcaacagccagtgggacatcgagacacagaaactgttcattaagtgcgtgcacgagacactgaagatccgctacgccaagatctacgcccggaccaaagaggatgagtacgttcagatcgagcgcgagaacatccggatcgtgtcccagctgaagagatgcaccaacgccgtgaatttccggaagtttattgccgagttctggggcaagaccggacacaaccctatcctgcaagaacatctggacgagatcctgagcatcaccagcggcatcatggactggaagatcgccaaggacctgacctttatcgccctggccagctatcccaagatcaagaccaccgagagcaacatctga

SEQ ID NO: 1052 - DNA, 957 bp, Homo sapiens
  source 1..957: mol_type = other DNA
atgctgaacggcttccccagaatctaccccgacgagctgctgtactccgtgatcgccagataccacatccggaacgcctacaagagcttccaccagagcgacatggaactgttcggctacgccagccagcagatctacagagtggtgctgccctgcaacctgaaccacctcgtgcgggaaatccatctgcacctgttctacgagctgaacatcaacgacctgatctaccaccacacactgtaccccttttacgccagcttcctgcctcctcaagaagcctggctgctgaagaactacatggaacagaaagccaacgtgtccctgagcgagatcctgaagtgccccagaaacaacaaagaggaagccaagaccttcctgaagttctgcctgtactgcatcgaagaggacacccagaagtacggcgagccctactggcacagattccatcaggtgccaggcgtgatcgtgtgccccatccatagaatcgccctgaacaacagcctggtgtccatcgagacaaaagagatccactatcacgcccctagcgacgacaactgccctctgaataccagcaccaccatctacaacgacgccacactgcagaaactgctggtgttcgccaacaacatcgagtggctgatcaacaacaacttcaccttcaagggcctgagctggctgcggagccactacaagacatacctgaccaacaagaatttcatcaccgtgttcagcaaggacaagttcatcttccacgagcaagagttctacaacgccgtgctgacctactacggccaagagttcctggaagccatcaatcccaagatcatcaagaaccccgagaagtactttagcaactgcctgctggcctgcgacgtgaaccccgtgatcgatcggatcatccatatcctgattatcaagttcctggccaactccatcgaggatttctttaaggcctga

SEQ ID NO: 1053 - DNA, 810 bp, Homo sapiens
  source 1..810: mol_type = other DNA
atgagcaaaggctggaccctgagcaccatcgacagacggctgaacaaccagagaggcctcggcgtcggcaagcagtataagccttggctgacagtgcgggaccagagcagcagtggaagatctgccagagagcccggctggaaaacaggcagagtgcaccacttccacagcgacctggaaagatacgccttctatatgtacgagttctgggaccaagtgctggacatccgcgagcagttccccatgttcgatgtggaactggccatgacaatcgccaaagaacagggcatgcagaacttcagggaccccaagaccaaggtgccctacatctacaccaccgacttcatgctgaccatgaacctgcacggccaagaagtgaacgtcgccagagccgtgaagtcccaccagcagctgaacaagagaagcgtgcggaaccggctgctgctggaacagagatattgggccgccaagggcatcgagtggcagctggttacagagcaagtgatcagcaaggtgttcgccaagaacgtggaatgggtgcacaacgcctactggctggaacccaccagggacctgaatatcagcgagctgctcgagctggccaaggtgctgaagctgatgctgagagacaacgacagcaccgtgaccaagatcaccaccagactggacaaagagaacgacatcgagcggggcaccagcctgtacctgttcaagtacctggtggccaagaaagaagtgatcatggacatgttcgagacacagatcttcaagagccccagcaccaggctgatcaagaaaatcgtgttctga

SEQ ID NO: 1054 - DNA, 2268 bp, Homo sapiens
  source 1..2268: mol_type = other DNA
atggaagagaacctgtacgtgaacgacctgatcgagtgggaactcgacagcggcaacaaggtgctggaacggatcctgtggatcgacgaggactacacaatcgcctttctgatcgacgtgaacaccaacaagggcctgcctaagctgaagaaagtgtccgagatcgtggaagagatcagcaaccggctggccttcaagcagagagtggatccttgggccagagtgatcagagaagaggacctgcgggacaccgagaaagtgatcagggacaaagcctggaacatcatcagcgagctggtgctcgaggaacccctgatctacgagagaaaggccagaggcagcctggtgcaggatgccatcggcaagtacaacgccagagaggacaacaacaagctgatccccaagaccgtgtacggctacctgcggaagttttggcagcggggcaagaccaagaactctctgatccccgactacatcaactgcggcggcagaggcaagacaaaggcctacagcgaagtgaagagaggcaagccccggacctacaagcacatcaacgagatcggcgagggcatcaacatcaccgaagaggacaagcggtgcatcctgatcggcatcgaccggtactacaagaagaagaaaaagatcagcctgaaccaggcctacaagctgaccctgaaggacttctacacctacgaggattacatcgagaacggcaagctgaagttcaatctcatccccagaagccagcagcctacctacacacagttcaagtactggtacaacatcgagttcgagcaggacgtgaaaaccagcatcatctcccggaagggcagcaaggcctacgctctgaagcacagacctatcctgggcaccagcaagagcgagacacctggacctggcagcagataccagatcgacgctaccgtggtggacgtgttcctgcggagcgtgtacaatatcaactggatcatcggcaggcccatcatctacgtggtcatcgacgtgttcagccagatgatcgtgggcgtgtacgtgggactcgagggcccttcttggatcggagctatgatggccctgaccaacgtcgtgaccgacaaagtgaagttctgcaaagagtacggcatcgagatctccgaggaccagtggccttgtaaagagctgggcgattgcatcctgggcgacagaggcgagctgatcggaatgcctcctgaggacacactgagccccaacctgtacatccggatcgagaatgccgcctccaagagaggcgattggaaaggcctggtggaaagccggttccacattctgcaccacgagacaaagccattcatccccggcttcgtggaccaagagctgaagcagatgaccggcatcgattaccggctgcggagcagactgaacatcgacagcttcacaggcatcgtgatcaacctgatcatcagccacaacaaccggcggcacaatagataccagcgcgacaccgacatgatcgccgacgacgttctgcccattcctaccgagctgtggaagtggggaatcgtgaacagaagcggcaggctgaaaagctacgacgaggatgtggtcaagctgaacctgctgcctatcatcaaggccaccatcaccagccagggcattaagctgaatgggaagctgaacaacctgttcaagctcaagggcaactacctgtactacacatgcgagaaggccgagaaagagcagtggttcaccaaggccagatccggcctgctgacccaagaagagaagtctatcgccgtgtcctacgacatcagaaagcccaacttcatctacctgcctagccgcgacggccggtcctttgagaagtgtagcctgatcgaccccgaggaaatctacagcaacaagagcttctacgatatcgactacaagctcacgaaagaggacgtcgagaagcaagagacacagggcgaagaactgcagaaagaaatcgatgtgaccgtggatatcgagaacatcgtgaataccgccgaggacaatttcaagctggaccaggacaacaccatcacaaagacccagcagatcgccaagatcggagagaaccggaagaacgagaagaaccagcggagagaggacgagggcttcgagctgcagagaacacagagcgagagcatcagcgacagcaaggacgaggtgcagaccaaggacaccagctctaacaagctgctcgtgcccgactactccaacatcctggaacagaacagagagggcagaaagcggggcagaagcaactga

SEQ ID NO: 1055 - DNA, 1746 bp, Homo sapiens
  source 1..1746: mol_type = other DNA
atggacgaggccatcaacttcaagatctaccacgagtgggactggaaggccctgcctaatggcggactgatcgccattgccagataccggcagcacaagcacaccgagtacaacctgaatcctctgatccagacactgcccgagattatcagcaatcaagagttcctgaacaaagtgaccctggaacctgacctgagcgacgaggaaatcatcggcgaggcccacgacagattccactgcgtggaaagactgagcgacttctacttcgagcccctgggcaagaccgtgtctctgtacaggctggtgtctaccctgatcatgcggggctacctgcacagaaaccctctggtgtctgagtacgccaagcggagccgcgagatcaatgaagccgtgcaggatggcaacggcaccaacatcctgaagtacatcagcctgcggatcagcgccagcgctctgacactgattggacctagcggcatgggcaagagcaccgacatcaagcggatcctgagcctgtatcctcaagtgatcgtgcaccccaactataagatctatcaggtcgtgtgggtcaaagtggactgcagctctatcggcagcctgaagggcctgtgcagcgacatctttttcgccctgagcagaatcctgaaggacgagaagtaccagaaatacgccgtgcctcggaacagcgtggactacatgctggctgaactggcccaggtggccaacaccatcaatctgggcgtgctggtcatcgacgagatgcagaacctggccaataccaagaccaacgagaacgacattctgaactacctggtggacctgagcaataccatcggcgtgcccatcatcagaatcggcacccctgaggccaagcctatcctgatgggcaacttccggaacgctagaagaggcggcgagtgcatcgaatggcacagactgaccagagccaccaacaagcaggacgacagctggaagaaaaccgatttctactacctgatcaccggcctgtgggtgtaccagtggaccaagacctccgtgaagttcgagaaagagttctacgacaccttctacaactgcagccagggcatcatcgacatcaccatcaagctgtacaagatggtgcagtggaaggctatcgccatcggcggcgaggaagagatcagcgttgagctgatcaacaaggtggccgccgagggactgattctggtgcagcctatgctggacgccatccgctctggcaagcaagaggacatcgagaagtataaggatatcgccctgcctgacgagtacgtgaccaactacagagagaagtgcatcagcgagctgatcggcagacagcagcaagagatccgggatagcgtgcggagacagcagggcagaaagtccatcctgcctaaagtgcgggccatcaccaccgagctgctgaaaacagagaagctgggcctcgacttcgacaaggccatcgagtatgccgagaaggtggtcaacagctccaaagaggacaacgacatcctgacgctgattaagaaggcccagattctggccctggacggcgacagcgtgaaaaccagcaagagccaagagagcatccagagcaagtcctccagcaagcccgccacaaacaagaagagacaggccgccaaaaagacgaacaagaagcagaatctgagcggcaacagccagtccgacgaaggcctggaaaccctgaaccagttcatcagcgacgatatcaccaagatccagtga

SEQ ID NO: 1056 - DNA, 654 bp, Homo sapiens
  source 1..654: mol_type = other DNA
atgatcgcccctgtgatcctgtacctggatgtgcccttcgccaccttcagagagagctacgccagagagacaggcaccacctatcctgtgcctccaccagccacagtgtacggcatgctgctgtctctcgtgggcgagacagacgtgtacagacactgcggagtggaactggccattgccatgctgagcagccccaagaagtcccggatcctgcggcagatgcggcggttcaagaacaccgacttctctcaccccgagaacgtgatcccttgctaccaagagatcctgagcaacctgaagtgcctgatctgggtccgaagcgacggcgagaagatccagcctagcctgagacagagaatccagctggccttcgatcaccccgaactcgtgcggagattcggctgtctgtttctgggcgagagcgaccagctgatcaagaccatcaagctggccagagaggactacctggaaggcgtgaagcagtgggccatccgggataatcagggcagactgaccctgccttactgggtcgaccacgtgggcagcagaaatacccggttcctgagataccggctggaagagatgagcagcagcagccctcctgacctggcctggacaatgattcagagccccttcgagaagtaccctctgtga

SEQ ID NO: 1057 - DNA, 663 bp, Homo sapiens
  source 1..663: mol_type = other DNA
atggccaccatcctgatccagagcgaggaatacctggacctgaccttcaagctgagaggcgcccctattcctctggacaacggctaccctatctacagcgccctgagcagaatctgccctccactgcacgagctggacagcatcggcattcaccctatcgccggcattcctaccagcaacaacttcctggaactgacagcccagagccggctgcggatcagaattcaccaccagcagatccctctgatctacccctacctgaccggccagacatttcagctgggccagcacagctaccagctggacatccccgattacaagcccctgatcagcagcgagagcgcctactctagactggtggtcatcaagggcttccaggacagcaccaacttcatcgaggccgtgcagcggcagctggataacctgggaatccagggcaaagtggaactgctgaccagacaggatggcacccctcagagaaggcagctgaccatcaacaaagagggcaagcagttcaaagtgcgcggcttcggcgtgaagatcagcgagctgaatcccgaggacagcctgatcctgcaagagcaaggcatcggcggcaagcggaagatgatgtgcggcatctttgtgcccgccaccagatccaaagaggaagaggaaacctga

SEQ ID NO: 1058 - DNA, 753 bp, Homo sapiens
  source 1..753: mol_type = other DNA
atgaagcagaacaacaacatccccaactactacctgtacggcaccgtgctgaccagatacggactggccagcctgaactacgagatgcggagaggcaacaagaccacactgcagaaaggctactggaacggcaagatccacagcttcgtgggcagcagcgccattagatgggccctgaggttctatctgcagaaacagggctacctggtcaacagagtgtgggacgaagatgagcacatcaacagactgaccagcgaggacttcgaccccgagcagttctacgacgacgacatcttcggcttcgccctgctggaatctgccgagacagaaggcgataccagcaccaccaagcggaagaaaaagcagaccaaggtgtcaagccccaaccagagaatgggcgccctgggcatgaatatggccgtgtctctgaccccttacgatggcgccgtgaagctgggagccaaaagcggcagacagaaagacagcaccagcctgcacttcaccgagtaccacgccaccagataccagtactacttcggcatcaacgtgacccacctgaaggacgtgtcccggatcctgcctctgatcgacggcatcatgaacctgcctaaagtcggcggcagcagcaatatcttcaactaccctttctgccccgacagcctggtgttccactggaccaatcacttcgccagctacatcagctactgcttcgagtactgcgaccccaagagcaaagaggccaagctgacctga

SEQ ID NO: 1059 - DNA, 1413 bp, Homo sapiens
  source 1..1413: mol_type = other DNA
atggtgcccacacagcccaagatcagcctgtctctggatgccgccgacaccaccatcatgcacagaatcggcatgaccggcctgtacatgaccctgaagcggctggaaaagcagtaccccagcagcagacagagaggcggacacatcagctggtttctgaccgccgataccatcgagctgttctgggagggcagcgattttgtggccctgagctggctgatcaaagagagctttcagctggacgacaccggcctgattcatctggccggcctggacaacgatggcatcgatctgagccagaagatccacatccacgagggaatctgcgccgtgttcctgcggctgaacaagttctaccaggccggaaagctggtcaacaccgagctgagagtggaagagaagaaggtggaacaccagtacaagagcatcacttggtacgcccaccagaccttcgccgagaagctgtgcgataccaacacacagcagttccggcaggactacgtgcagatcaccagctggctgtacctcggaggaattgtgcggcatgccagacggcagaacatcaccaagctggaagaaaagcccgagtacgccctggctctgctgtttgtgcctgtcgtgtgccactactgcctgctgcacatccctagcgaggacctgaaagagaaaaagccccacagatacctggtggtcatccccgacatcaaggacttcgaggatgccagccagagaagatggcggctgcagcagctggaaacaaagcagctgcacgtgtccagcctgggagaagctggcctgctgtactacagcctggataacatccagcctgagggcgactactatcaggcctgccaagtgtggctgtacgagaagatgaaccggaccagccaccagcggaccctgatgagcatcgaggaaatcaagatcgaccggaaggccctgatcagctacaaacaggtgcagcagtacttccagccgaactacaagaagattcagagcaagcagatcttcatcgaagtgaaccccattcggagcctggtggccgagaatctggccaagggaatccactggctgagcgatttctgggacaagctcgtgatcgaggacagcaagagatacctgttcaaccacctgttctacaaccgcgagggcctgatcattatggccgagacaatcgagtacaacgagcagtacctcatcttcatcaaggtgttccagcaggctatgcggggcaacttcgccaagatgtacgccaaggccgatgagggcaagcagcctcctatcaagaaaaaagtggaacggctgcgggccgagctgaactgctgctatgatgagctgagcttcaaagagtacctgagcgacttcctcgtcagaggcggagtgaacaagtactttcacgagcaccagaagtga

SEQ ID NO: 1060 - DNA, 990 bp, Homo sapiens
  source 1..990: mol_type = other DNA
atgaccatctacagcgagcactggaacctgaagcctatcaagatccctcagcggagccggctgttcagcctggaaccagttgctgtgggcacaccttacgccgagagcctgtctagctacctgcacagactggcccaggctcactgtctgaccagccagaaactggtcatgggcgagatcgcccctctgatcctgaaggacgaggacaagtctgagctgctggccaagaacctgagccatctgctgggcaacagagatgccaagcctaccatcaacggcatgagagagatgaccggcaagctggtggccgtgctggaagaactgaccatgagacaggacctgcggtttctgaccctgctgagctggaagggcatgatctacgacaagggcctgttccgcaactacagagcctggtgtccttgctgctgggaggaaggcaagcaagagaacaagacaatctacgagcccctgctgtggtccttcaaggacgtggaagtgtgcctgatccacaagcagcggctgatccaagagtgccctcactgcagctctagactgcccgtgatcgccagattttcccctgccggcttctgcagcagatgctatggatggctgggccaagagatcaagggcgaagaggaaatcgagaagtaccggatcaacatccaagtgatcaaagagctgatcgccatcacaccccagctgcggtacaagcccattcctatcgacctgaccagacggctgcagctgatcctgctggtgtttgagcaggccatcggcaacgacctgaagctgcttggtggactcggcggcatcatggaaagcctgagaatcgccagcaaccagaaccagaatcagccctaccacctggtcaagatcatcatccccgtgtgcgagaaggccaagatcagcgttagccagctgctcggcagcgactttaaagagctgggagagatcctgttcgggaacttctccctggaactgaaactgtga

SEQ ID NO: 1061 - DNA, 2697 bp, Homo sapiens
  source 1..2697: mol_type = other DNA
atgaaggaacagttcgagcagtgggtcgcccggctgcagatttctgaagccggccagaaaatcgtggaaaaagtgcggagcagcgagcccagcagaagagttggcggaggcagcaagaatgtgtccggcagatacccctccagaaagatgggcgtgaccatccagttcgagagccacagagtggaactgcccatcatctaccagctggaacacgacgaggacgtgctggaattctacgaccagcctcctcagatcaagctggactaccaggccagcaatggcagacgactgggagtgctgcacacccctgatttcttcgtgatccggaccaatagcgccggctgggaagagtgcaagaccgagcaggatctgaagaagctggccgagaagaaccccaaccggtacttctacagccaagaggacaaccagtggcactgccctccaggcgaagtgtacgcctctcagttcggcctgtactaccggatcagaagcgaccgcgagatcaactgggtcatgcagcggaacctgcagttcctggaagattactaccgggccgagagcctggtggtggaagaagccattgctcagagcgtgatcagcatcgtgtctagccagcctggcatcacactggccgagctgctgaatagaagcaccggcgccaagagcgacgacatctacaccctgatcacccaggaccagatccacttcgacctgaacgccacacctctggctgagcctgagagatgcctgctgttcagagatgagcagaccgccagcgcctaccggctgatggttgaacagcctagagccaacctgcctgccatctctcccgtgatcaatctggccaccggcaccaccgttagctgggatggaaagggcctgaacatcatccacgtgggcgagacagaagtggtgctgggcgccgagaacgacagactgatcgagctgaagaaggccagattcgaggacctcgtgcggcagggcaagatcacatctctgcagacagccgagcagactgccatcagcacagagagctggcagcggttctatcaggcctctcctgaggatcaggccgaggctctggaacggtacaagaccatcgagccctacctgaacggacaccctcctgagaacgagacaatccccgccagaaccatcagacactggaaggccaagtacctgacagccctgcagcagcacggctgtggctatatcggactgctgtcccacagaagcgtgaagggcaacagacagagaaagctgcccgaggacaccctggccatcatggaaagattcattctcgaggactacgagacactgaagcagaaacggatgctggaagtgtatggcgccctcgtcagagcctgtgaacagtctggtgttatcgcccctagctacaagaccttcaccgaggaagtgaagcggcggacaggctacgagcagaccaagaagagacaaggcagaagggccgcctaccagcacgagtccttttactgggagctgacccagaccacacctcggcatggcgatagacctttcgagatcggccacatcgatcacacccagctggacgtggaactcgtgtgtagccacaccggcagaaacctgggtagaccttgggccacctttctggtggacgcctactctagaaggctgctggccgtgtacctgaccttcgacagcccaagctaccggtcctgtctcatggtgctgcggatctgcgtgaagaggcatggaaggctgcctcagatcgtggtggtcgataatggcgccgagtttcacagcctgtacttcgaaaccctgctggccaccttcgagtccaccaagaaacagcggcctccagccaaggctagattcggcagcgtgtgcgagagactgttcggcaccagcaacacccagttcgtgcacaacctgctgggcaatacccagatcacccggaacgtgcggcaagtgaccaagagcgtgaaccccaagaatcaggccgtgtggacactgggcctgctgtacgaatatctgtgcgcctgggcctacgaggtgtacgacacagatgaacaccccgctctgtttcagagccccagggatgcttttgccgccggaatggctatcggcggctctagagtgcaccggatgatcccttacgacgagaacttccagatcatcaccctgcctaccaccagcgagggcaaagccaaggtgcaagttggcagaggcgtgaagatcaacagcatctactactggtccaacagcttcagggatccccagatcgagaacaccagcgtgcagatcagatacgaccccttcaacatcggaatcgcctacgcctttgtcagaggccagtgggtgcagtgcatcagccagtactacgccgaactccagggcagaagcgagaaagagctgaaactggccagcatcgagctgcggaagcggtctagcaatcacgcccagcagtccaaggtgtccgccaagaatctggctggcttcctggcctctatcgaggcccaagaagctctgctggaacagagaagctacgacgccgaagtgaaagaggtgttccgggtcatcgaaggcggcaaggccatcatcagcagaaatgagcagcccaaagtgatccaggtgccgtttgagaacaccgacacacaggtggccgaggataaggccatcgtgcctgagaagctggtggtgtacgaggaattctga

SEQ ID NO: 1062 - DNA, 1152 bp, Homo sapiens
  source 1..1152: mol_type = other DNA
atgaccaagagcaccggctttccactggaactgctgaagctgcccacacctgagagactggcctacttcgagaactacaccgtggctcaccccagactgaaagaggtgtacgagatcctgatgcagaccatcgtggaacctgccggcgctagcttcatcttcgtgtatggacctagcggcgtgggcaagaccacactgagactgagagtggaacagaagctgaccgagctggccctgcctaagctggaaagcgatagaagctgcgtgccagtcgtgggcgttgaagctgtggcccctgagagcagaaacttcaactggaaggactactacacacgggccctgatcgccctggaagaacctctgatcgaccacaagttcaactacggcgtgcggggcatcagcagagacaacttcggcaagatcaacatcgagagcaaggtggtggccccagctctgagaagggccctcgaaaatgccctgatccacagacaccccgacgtgttctttgtggacgaggcccagcactttggcaagatggccagcggctacaagctgcaggatcagctggattgcctgaagtccctggccaacatgaccggcatcctgcactgtctgctgggcacatacgagctgctgaccttcagaaacctgagcggccagctgtctcggagaagcgtggacatccacttcagacggtactgcgccgacaatcccgaggacatccaggcctttaagagcgtgctgctgacattcgagcggcagatgcctctggccgagacacctgatctggtttcccactgggagtacttctacgagagaaccctgggctgcgtgggcatcctgaagaactggctgacaagagccctgaaggacgccctggacaaagaggccacaaccgtcacactgaaggacctgcagaaacgcgcttggagcgtggcccagtgccagaagatgttcaaagagatccaagagggcgaacgccagctgagcgagacagagacagacgtgcagaacctgagaagcctgctcggcctgggcacaaagcctatgggactgcctgaggaaacccctaagaccaccagacctccaggcaaagtgggcaaaagaaagcccaagagggaccccatcggagtgcagcaggatgtgtcttga

SEQ ID NO: 1063 - DNA, 648 bp, Homo sapiens
  source 1..648: mol_type = other DNA
atgagcagcattgccctgtacatcgaggtgcccttcgccacctttagacagagccacggcagagagtacggcaagacctacagcatccctccacctagcacagcctacggcatgctgctgtctctcgtgggagagacagacgcctacaagcactgtggcgtgcagctggccattgccatgctgagccagcctagaaagtccaacgtgctgcggcagctgcggcggttcaaagtgaaggactacagcgacagccggaacagaatccccgagtaccaagagatcctgaccgacgtgaagttcatcacctgggttgcctctggcgccgaacaggttcagcctacactgagcgagagagtggaacaggccctgatgcaccctaccagcgtgcagagattcggctgtctgtacctgggcgagagcaacgacctggtcaacgtggtcaagctggtgtccgacgactacagatccgagagcagacagtggctgatcagggacgacgagggcttcatcaccctgccttattgggtcgaccacgtgggcagcaagggcaccagatggctgagataccggctgcaagagatcgccacacagagccctccagattgcagctggaccaccattcaggcccctgtgtgcaagcacctgtga

SEQ ID NO: 1064 - DNA, 651 bp, Homo sapiens
  source 1..651: mol_type = other DNA
atgctgaccgaggacagcccctatatcgacctgggctttagcctgaccggcagcacactgcctctggacaacggctacatcatctacagcgccctgagcagaatctgccccgccattcaccagctggacaacatcagcattcaccctatcgccggcattcccgagttcagcaaagagctgagactgacccagcggagcaagctgcagatcagactgcccgtggatctgatccccttcatctacgagtctctggccggacagaccttcagcatcggccagaatcagttccacctgggcatccccgagtacaaccctctgcaccctttcagcgacctgtacagccggctcgtgatcatcaagcggttccaagagcctcagcggttcctggaagccgccaagcaccagctgaagtccaagggcatccagggcagcatcaacctgagcaccagaagcaatggccagcctcagtgcagacagctgaccatcaagaacaccaccggcacctttgccgtcagaggcttcggcatccaagtgaccgacctgaatcctgaggacagcatcaccctgcagaagtacggcatcggcggcaagcagaaaatgatgtgcggcgtgttcgtgcccagcagacggaacaagcgggaaagacagtga

SEQ ID NO: 1065 - DNA, 930 bp, Homo sapiens
  source 1..930: mol_type = other DNA
atgtaccagctgttcggcaacctgctgacccactatggaagcgccagcctgaatcacggccagagcaagggcaatgtgtcccctctgcagaaagtgtggtggcacaacaagacccacagcaccgtgtctggcgacgccattagatgggccctgaggtactattggcagcagcagggctaccccgtgaacagagtgtggaacgccgataccttcgagcacaagctgatcgacaacaacttcgaccccgtgcggttcatcgacgacgatgtgctgggctacatgggaacagaggccgccaagaaagagatcaccgacgaggaaagcgagacacaggacaagcaggacaaaggcaagcggcggaagaaggccaagggcaagtctatccctagactgggagccctgggagtgaacagggccatcagcctgacaccttacaacggcaccatgaccttcaacgccaagagcggcgagaaggacagaaccagcctgcacttccacgagtaccacaacaccagataccagtacgtgttcgccctggatcctaaccacctgaaggacaagagccggatcttcgccgtgctggatggcctgatcagcatcagaaaagtcggcggccacaacaacgtgttctgctacgacttcagccccgagagcatgatgttccggtggacccagcagaacagccctcacttcttctactgcttcgagcagcacagcctggaactggaccctatcgtgtccagcgacctgatcgaacaggtggaagtggaagatatcatcggcagcgagctgtggatcggcggcaagatcgccaagaacctgcacctgaaagacgcccacatctttctgggcagagaacaggccgtggccgacctgaaaagagtgatcgccagagatctgaacctcatcgagttccagcctagcagctga

SEQ ID NO: 1066 - DNA, 1521 bp, Homo sapiens
  source 1..1521: mol_type = other DNA
atgaccaccaccacacggcccaagatctacctgacactgagagccagcgacaccaccatcatgcacagagtggccatggtcggactgtggatgaacctgcaccagctggaaagacggttccccacacacgccagcagacccaacaatctgtcttggagcctgaccaacagcagcatcagcctggattggcagggcgaagatctgatcgtgctggactggctgctgcggcagagcttccagatcaatgagaagggcctgatcagcctgaccggcctggatagcagcagcatggaactgatcaaccagatccatctgcaccaggctatcggcgccaccttcctgagacacaaccagttctacaagagcggcgagcaggccagcgaggacctgtctatcgatggcatcaccggcacactgaagtacaagaaaatcgagtggtacgcccaccagagcttcgccaacaagctgtgtgatgaggccggccagctgcggagagacttcatccagatcgtgtcctggatctaccctggcgccacagtcagacacgccagactggaaaagtctaacaagctggaagagaaggtcgagtacgccctggctctgctgtttctgcctctcgtgtgccagtacttcatctggcacagcaacagctccaaggtggacaccaagcaggccgacaagtacatcgtggtcatccccgagatcaccaacctgacaatcgccgctcagcggagatgggagctgagaaggctggactacaaggacctgcacgtggcctcttggggagaagccgctctgaactactacagctacgacgagacagagaacagcaacgagtaccacgaagtgtgccaggtgctgctgtacgagaagctgaacaaggacagcaaccagcggtccctgaccaatatccagaacatcgagatccaggccaagaccatcctgctgtacaagctgatcaacaagtacttccaagagaacaaggtgctgcggaagggactgaagctgatcgtgaaagtgaacagcctgaagggcatcattgccgacaacctggtcaagggcgttccctggtggagcgacttctggatcaccttcaaccaggacaccttcggcgacctgagcaaacagctgctgtataacagagaaggcgtgcgcatcatgatcaagatcgacgaggaaatggaaatctacaagtccttcatccgggcctgccacgaggccctgagaaagatctacggcaagatctatggcagggccaaagagggcgaagcccctagattcgagagagagtacgagcggatcagaggcgagctgggcagatgctacgaccagcagtccttcaacgacttcctgagcgatttcctgagcagagccggcctgaattctgccctgcatgatcagtgggagagcatcctgcctctgctgatgggccagatctcctgggagaaagccagaaacctggtgctgatcgccctggccagctacaagcctagcgagaagccttccggcgagttcagctaa

SEQ ID NO: 1067 - DNA, 1020 bp, Homo sapiens
  source 1..1020: mol_type = other DNA
atgaccgtggatgagtgcaccagcgtggaaatgtgggacctgcagaagcctgctctgcctcctagaagccggctgtaccacctggaacctatcggcatcggcacccagtacacagagagcctgagcagctacctgtgcagactggcccaagagcactgcgtgaccagccagaaactggtcatgggagagatcgccctgcagatgctgggcgaagattatgagctggccctgatcaagaagcacatcagcaccctgttcagcaacagcgacgccaagcctgccatcaacggcatgagagagaaaacccagagcctggtgcaggccctgaaagagctgacccagagaaaggacctgaagttcctgagcctgctgacctggaagggcgtgatcaacgagagagagctgttccggcagtaccgcgcttggtgccctcagtgtaatgagcagtggcggcagggcagagaagtgatctacgagcctctgctgtggtccttcaaagaagtgaacatctgtctgcaccacaactgcctgctggtggacgagtgtcctctgtgcagctctagactgcccgtgatcgccaattctctgcagctgggcttctgctccagatgcaaaggctggctgggatctcaaggcggcgagaagcagagcttcaagaccgacgagatggaatggaaccagtacaaagtgcggagcatcggcgacctgattgccgtggctcctaagctggaataccagctgagcctggaaaacctcgtgcggaaactgcagctgatcctgttctgcttcgagcgggccgtgaaccaggatctgacccacctgattaagctgggcaagatcatggaacagctgaagattgccctgggccagcactacaacaagcccttccacctcgtcagactgctgatccccgtgtgccacaaggccaacatctctatcagccagctgtttctcgaggacttcaacagcctgagcgagatcctgctgaagaacttccagatcaactacagcctgacctga

SEQ ID NO: 1068 - DNA, 2793 bp, Homo sapiens
  source 1..2793: mol_type = other DNA
atgctgaccgaggacgagttcaagaactggtgcagacggctgaacatgaccgagctggccagaaagaccatcgaagtgatcagaagcagcgagcccagcagactcgttggcggcggaagaaagaatgtgtccggcagataccccagcggcaagatgagcagaaccatccagttcgagagccaccggaatgagctggcccacatctacaagctggaactggacgaggacgtgctcgagtactacgaccagcctcctagaatcgagctggactacctggccaagagcggcagaagaaacagacaccctcacacacccgatttcttcgtgatccggaagaacaccgccggctgggaagagtgcaagacccaagaggaactgctgaagaaggcccaagagagccccaacagataccagctgacagagcaaggcaagtggcagtgccctcctggcgaggaatatgcccaacctagaggcctgtactactgcctgagaagctccgccgagatcgactggatcttccagcggaacttcgtgtggctcgaggactacttcagagacaaggtgccccaggtggacgaacaggtgtcaagagccgtgctgagcatcgtggaagccgagcctggaattgtggtggccgagctgctgaacagagtggaacaggccaccgtggacgacctgaacatcctgatcgccacagtgcgggtgtacgccgatctttctgctgccctgctgagccagcctgagcaggtccaagtgttcctggacagagaggaagccttcacatacgcccaagtgaccaagatcgcccctgccgctcctggatctcaagtgtgcgctgtgaaagtgtctgccggcaccagcatctcttgggatggcgagcattggcagatcgtgaacaccggcaataccagcatcggcctgctgaaggacaacggcgagttcatccagctgcctaacaaggtgttcgaaggcctggtggaaaagggccagatcacaggactgctggcccagacagagtccagcctgaatgccgaggtggaagagatcctgtgcaaggccagcaagcgggacagagaagaggccaacagacggtacaaggccatcgagccctttctgaaccggaacagcagcaccaagcctaacagcagcgagaggcggtggatcgtgtcttacctgaaggccgagaagatctaccagcggggcttcatcggactgctgccaaaccacagagataagggcaactacctgcctaagatcagcgaggaagtgcggatcctgatggaagcctttatcgaggataagtacgagacactgaagcagcagagcatcatccgggtgtacagcagcttcaaagaggaatgcatccagcagggaatcaagcaccccagctacgagtggttcagacaggccgttcatggcagacctgcctacgagcagaccctgaagagaaagggacacagagccgcctaccaagaagaacccttctactggcggctggaccgggaaaagacacctcctcatggcgagaggcccttcgagatctgccacatcgatcacacacaggccgacgtggaactggtgtcctctatcatggccgccatcggcggcaacctggaattcctgagaaagaacggcaatcaagagaggccttggctgacactgctgatggacgcctacagcagaagaatcctggccgcctatctgaccttcgatcctcctagctaccggtcctgcatgatggtgctgagaatctgcgtgcagagattcggcagactgccccagatggtggtggtggataatggcgccgagttcaacagcaccgacttcgaaaccctgctggcctactaccggtgcaccaagaagcagaggcctagcgccaagggcagattcggaagcgtgatcgagagattcttcggcgtggccaatcaagaattctggcacaacctgaagggcaacacccagatcatgcggaacgtgcggcaagtgacaaagagcgtgaaccccaagaaccaggccgtgtggacactgggcaaagtgtacgagtacctgagcgagtacgtgtacgaggtgtacgaaagcagccctcatcctgctctgagacagagccccagagatgcctttaacgccggcatcgtcagaggcggctccagagatcatctgctgatccctccagacgagttccggctgctgtctctgccttctccaaccgatagaggcggcaagcggaaagtgaccagagaaggcgtgaagatcaaccacctgtactattggcacaagagcttcagcggcatcaaagtgcgggacaccgatgtggaagtgaagtacgaccccttcgacatcaccgtggcctacgcctacgtgaacaagcagtgggtcaagtgcagcagcggctacctgcaagaactgcagggacactctgtgcgcgagctgatgattgccaccaccgagctgaagaaactgaacgagatccagaacaggcagttcagcgagatcaccggcaagaaactggcccagttcctggtgtccgtggaaaaagaagaggtggccctgtctcctcagcggcgggatgctaaaaaggccgtgctggaacagcggaagcgcgatctggaagtcaaacaggtgcacgccctgatcgacggcgactacgttgagcaggataccgacagctgtgtggaccacctggaagagagcaagtcctacgagagcgagagcctgcctctgcctacagagtctatcctgctggacgacgaggatgacgacttcgagaacttccagcctctggaagagtggtga

SEQ ID NO: 1069 - DNA, 1191 bp, Homo sapiens
  source 1..1191: mol_type = other DNA
atggccaccaagcagggctttccacctgagctgctgacacagagcgcccagaagagactggactacttcaaggcccctggcaagaccgtgcggcacagaaatctggaactggcctacaaccaggtgctgcgggccattagagaacctgccggcgcttctatcatcctggtcatgggacctagcggcgtgggcaagacaacactgctgagactggtggaaaagaacatcctggaagagtccctgcctcagatggaactggaccctggctggatccctatcgtgtgcgtggaagctgtggccccaggcaaggataccttccggtggaaggacttctacaagcggaccctgatcgccatcgacgagcccctgatccaagagaagatcagctacagcgaggacggcatcagaagggactctgagggcaagctgatcgtgaagtccagagccaccgaggacagtctgaggctggctatggaacaggccctgagccacagaaggccttacacactggccgtggacgagttccaggacatcggcaaaatggccagccagaaggtgctggaagcccacatggacagcatcaagagcgccgtgaacaccaccaagattccctggaccggcttcggcacctaccagctgctggatttcctcgagctgagcccacagctgagcagacggacccggatcatccatctgcctcggtacagactggaagaggacgaggacatcgaggtgttcaagctggccctgaagcacctcctgtacagaatgcccctgcctgagacaccccggctggtcaacaagtactgggagtactgctacgagcggagcatcggctgtatcggcaccctgaaagattggctggtgcaggccctggatctggcccttgaagaaggcgccacaacactgagcctgaaccacctggaaaagaccgccaagctgaccagcgagtgcatccagatggccaaggatgccatcgaaggcgaggacatgctgaccgacagcaaagagagccagcggcagctgagagaactgctgaacagcaagaagcagaagattcaagaggcccagaccaacagcggcaaggacgacaagcaagagaacaacgccggcaagagcaagggcagctccagaagaagagtcggccagagaaaccccaagagggatcctgtggccagcgagtctctgtga

SEQ ID NO: 1070 - DNA, 639 bp, Homo sapiens
  source 1..639: mol_type = other DNA
atgaacacccctctggtcatctacctggacgtgcccttcgtgaccttcagagagttccacgccagagagatgggcagaacataccccgttcctccaccagccacagtgtacggcatgctgctgtctctcgtgggcgagacagacgtgtacagacactgcggagtggaactggccattgccatgctgagcgaggccaagaagtcccggatcctgcggcagatgcggcggttcaagcagaaggatttttcccacgccgagaacgtgaaccccagctaccaagagatcctgagcaacctgaagtgcctgatctgggtccgaagcgaggccgagatgatgcagcctagcctgaaagagcggatcgagttcaccttcgagcggcctgaactcgtgcggagattcggctgtctgtttctgggcgagagcgaccagctgatcaagaccatcagactggtgtccgaggactacagagaaggcgtcagacggtggctgatcagagacaatggcggcagactgaccctgccttactgggttgaccacctgggcagcagaaacacccggtttctgcggtacagagtggaagagatgaaccagctgagccctcctgacttcgcctggacctctatccagagcagcgtgtga

SEQ ID NO: 1071 - DNA, 666 bp, Homo sapiens
  source 1..666: mol_type = other DNA
atgaccgacaccgtgatcaacagcgaggaacacctggacatgatcttcaagctgagaggcgcccctattcctctggacaacggctacgtgatctactctgccctgtgccggatctgccctacactgcacgagctgaaggacgtgggcattcaccctatcgccggcattcctactcagaacaagttcctggaactgacccctaacagctgcctgaagatcagaatccaccaccttcagatccccatcatctacccctacctgaccggccagaccttcgagatcggccaagagagctaccagctgaacatccccgactaccaggccatcagaagcagcgacagcctgtacagcagactggtggtcatcaagggctaccaggacagcagcagcttcctggaagcagtgcagagacagatggacagcctggccatccagggcaacgtggaactgctgaccagacagaatggcacccctcagagaaggcagctgaccatcagaaaacaggggaacgagttcaagatcagaggcttcggcgtgaagatctccgagctgagccctgaggatagcctgacactgcaagagcaaggcatcggcggcaagcggaagatgatgtgcggcatctttgtgcccgccaccagacctaaggacgagagaaagaccccttga

SEQ ID NO: 1072 - DNA, 972 bp, Homo sapiens
  source 1..972: mol_type = other DNA
atgaaccagaagaagaacaagatccccaactactacctgtacggcaccgtgctgaccagatacggactggcctctctgagccacggcatgagacagggcaacaagagcatcctgcagaaggcctactgggacggcaagatccactctctcgtgggcagcagctctctgagatgggccctgagattctacctgcaagaggaaggctaccccgtcaacagagtgtgggacaaagacgagcacatcaaccggctgaccgacgacaacttcaaccccgaccagttctacgacgacgacatcttcggcttcgccctgctggaaagcgtggaagaggaaaccgtcgaggacaagacccagcctagcactcggagaagaggcaagagaaagaagtccggcaccaccgctcagagaacaggcgccctgtctatgaacaacgccatcagcctgacaccttacgacggcagcctgaagctgggagccaagagcggcagagacaaggatagcaccagcctgcacttcaccgagtaccacaacaccagataccagtactacttcggcctgaacgccacacacctgaaggactgcagccggatcttccctctgatcgacggcatcatggacatgcccaaagttggcggcagcgccaatatcttcagctaccctttctgccccgacagcctggtgttccagtggaccaatcacttcgccagctacatcagctactgcttcgagagcgtggacggcaaaggccggaacatcaagctgacccaggacttcatcaacgaggtggaatgcggccagatcaaccctgacgagctgtggattggcggagccatcgtgaacgacctgagagagctggaaaacttcgagaagtccctgctgaagcagatccacctgtaccggaaccggaatgagctggtggccgacctgaaagaagtgatcaagcaggacctgggcctgaaggatagccagtga

SEQ ID NO: 1073 - DNA, 1548 bp, Homo sapiens
  source 1..1548: mol_type = other DNA
atgacagtggccacacagagcaagatcagcctgagcctgaccgcctgcgacaccaccattatgcacagagccggaatggccggcctgtacctgacactgaagcggctggaagagaagtaccccgacttcagacagagagagggcaacctgagctggtccctgacacctgacaccatcgacctgttctgggaagccatcgacttcagcgccctggactggctgctgaaagagagctttcagctggacgacaacggcctgatctgtctgaccggcctggacgattacagcgagctgagacagaagatcgagctgaacgaggctatcaaggccgtgttcctgcggcacaacaagttctatcaggccggcgaggccaagaaaatcagcttcaccgtggaagaacgcgaggtgtcctacagctacaagcccctgatttggtacgcccaccagaccttcgccaaagagctgtgcgacaccgacacacagcagctgaagcaggactacctgcagatcaccagctggctgtatctcggcggaattgtgcggcatgccagagccgacaaaaagaccaagctggaagaaaagcccgagtacgccctggctctgctgtttgtgcctgtcgtgtgccactactgcctgttccatctgcctagcgaggacgtgaacagcagaaagccccacagatacctggtggtcatccccgagatcaacaacttcgaggacgccagccgaagaagatggcggctgcaacagctggaacctcagcagctgcacgtgaccaatatgagcgaagccggcctgctgtactactccctggatgagatccaggccaacgagaactacagccaggcctgccaagtgtggctgtacgagaagatgaacaaggccagctaccagcgggtgctgaccatggtggaagagatcgagatcgacaaagagatgatcaccacctaccagcaagtgaagcagtacttccagcctaactaccagcacatctaccccaacaacatcctgatcgaagtgaacctcgtgcggagcctgatcgccgagaacctgagacaaaagcagccctggtggttcaacttctggaagaagctgatcgacgaggacagcaagaactacctgttcaagcagctcctgagcaaccagaaaggcgtgaagttcatgaccaagaacagcgagcgggacgagaagtatctggccttcatcgaggtgttccagcaggccatgagagccaacttcgccaagatctacgccaagaccgagcggggcaagaaccctctgtttcagaagaaggccgagcggctgagagccgagctgaattgctgctacgacgagatctccttccagcactacctggccgactttctggctagaggcggcctgaacaaacctctgcagggccagaaaagagaggtgctgctgctgatccagcaggtcccctgggagaaactgagaatctgggccctgctgggaatcgccagctacgagcccaagcctaagaacctgcaagaactggaaggcatcaaggacgagagcgaggaagagtga

SEQ ID NO: 1074 - DNA, 990 bp, Homo sapiens
  source 1..990: mol_type = other DNA
atgagcatctacgaggaattctggtccagcaagcccctgaagctgcctcctagaagccggctgttctgcctgaagcctatgggcgtgggcacctgttacaccgagagcctgagcagctacgtgaacagactggcccaagagcactgcctgaccagccagaaactgatcatggccgagatcgcccctctgatcctgaagaacgaggacaagagcgacctgctgaagaaaagcgtgtcccatctgctgggcaacaccgacgccaagcctgtgatcaacggcatgagagagatgaccggcgaactcgtgcgagtgctggaacagctgaccatgagacaggacctgcggtttctgaccctgctgagctggaagggcatgatctacgaccggcagctgttcaagaactacagagcctggtgtccctgctgcctggaagagtggaagggcgagaagaaagtgatctatgagcccctgctgtggtccttcaaggacgtggaagtgtgcctgctgcacaagcagcggctgatcgaggaatgccctcactgcaatgccagactgcccgtgttcgccagactgtctcctgtgggcttctgcagcagatgcagaggctggctgggcgacaaaaaagaagagatggaagaggtcgagccccaccgcgtgaacatcgaaggcatcggagatctgatcgccgtgacacccaagatggcctacaagcccattcctatcgagctgacccggaagctggaagtgattctgctggccttcgaagaggcctgcggcaaggatattaccctgctgggagatctgggcgtgatcatggaacagatgcggatcgccaccaagcagcaccagaacaagccttaccacctggtcaagctggtcatccccgtgtgcgagaaggccaacatcagagtgtctgaactgctgctgctgaacttcaaggccctgagcgaccgggtgttcgagaatctggaactgggcatgagactgtga

SEQ ID NO: 1075 - DNA, 2769 bp, Homo sapiens
  source 1..2769: mol_type = other DNA
atgctgagcgacaccgagttccagacttggtgcgacggcatgcagctgagccagagacagagagaactgatcacccaagtgcggacaagccctcctatccggaaagtgaagggcagcgccagaaacgtgcacggcagataccccagcaagaagatgggcaccaccatccagttcgagagccacaccgttgagctgcctgctctgtgcgagttctacgagtacgacgacagcgtgctggaatactgggaccagccttacaagttcaccatcaagtgcgcccctgagggcagacaggccaccacaatcacacactaccccgactttctggtgctgcggaagaacagctgcggcttcgaggaatggaagaaagagactaagctggaaaagctgagcgagaagcagccctacagataccagaagcaagaaggcatctggatcgacaccatcgtgggcgagtacctggaaaacctgggctactactactgcgtgcggagcgacagagaaatcgactgggtcaagtaccggaaccagaagtacctgcagagctacaagcacggctacctggaccagcagtacatcatcgacaccgccgtggaagaggaactgaaggacatcatcaatcacaaccccggcatcgacctgaccacactgctgaacaaagcccagaacgccaccatcgacgacatcaacacactgatcgccctggaaaaggtgtacgtggacctgagcgtggtgcctatcgaggaacagctggacaaagtgcacctgttcagagacaaggccaccgccgaggcctacatcaccgccacacacaattacagcgagcccatcacaggcagcgtgcagatcgtgaacctgaaagtgggcagcagcttcctgctggacggcaagagcctgaccatcgatcacgtgggcgacagcaagatcatcctgaagggcgagcagggcatcatcagatggacccacgccgagtttcagcagctcctggaactgggcgagatcacccacctggaaaccgaggaaaagcccgctctggacgaggaaggctggcagtactttgtggaagctagccccaaggctctggaaacagccaaccagagatacagcgccatcaagcccctgctggatggcgagacatacagcagcctggacatcgacatcagcgcccggacactgagacactggaaggccaagtatcagaaggcccagcaggattacggctgtggcttcctgggactgatccctcagagcaagggcaaccccacacctaggtacagcgacgaggacgtggaattcgtggataagatcattgaggaacagtacgagacattcaagcagaagaacgcctggcagacctacctgcggctgcgggatagatggaaagagagcggcagaacaagccccattcctagccacaccttctactacgagcggatcaagaagcggaacagctaccagcagaccaagcggagaatgggaagcagagccgccaacaacctgctgaggccatggctgatcgagctgacaacacccagacacggcagcagacccttcgagatctgccacatcgaccacacacctctggatgtggaatgtctgtgcccctacagcaacaagaacctgggcagaccttgggtcaccggcatgatcgatgcctacaccagacggattctggccctgtacctgaccttcgacgagcccagctaccggtcctgcatgatggtcatgagaatctgcgtgcagagattcggcagattccccgagctgatcgtggtggacaacggcaaagagttcagcagcacctacttcgagacactgctggccagattcgaggccaccaagaagcacagacctaaggacgtgcccaagttcagctccatcatcgagcgttggttcggcagccagaatcgcgagttcatcaacaatctgcggggcaatacccagatcatgaagcacgtgcggctggtcaagaaagaaaacaaccccaaaaacctggccacctggacactggacgagctgtacgattacctggccttcggctacgcctacggcgtgtacgatagaatgcagcaccctgctctggaaggcatgtctccacagcaggcctatgaactgggcctcgccaagacaggacacagaccccaccagtacattaagtacgatgagcagttcaagatcctgacactgcccaccacacagaaaggcaccgccaaagtgatccctggaacaggcgtgcggatcaactaccaggactactggaccgatgagttctaccgcgtggaaaaccagagcgtgcccgtcagatacgaccctctggattatggcgtggcctacgcctatatcaacaaccactgggttaagtgcctgagcaactaccacctgagattccagggctacagcgagaaggccgtggccattgccacaaccatctgcagacagaagagaaagcagagcaaccagagcctgtacgtgggcgccaatgagctggtgtccctgctgaagaatgccgaggactacgaagaactgatgctgcagatccggaaggaccagagcgccaagctggtgtacaatctgatcgagggcaacctgagcagcgccgtgctgaatcctgccgatatcgagcacccatttctgcaggacgacagcaaagtggacaacaacttcagcaacctggatgaggacatcctgcagcctagcctgagcaccacaacacagagcgacaacgaggacgatgacatcggcttctactccaacgaggaactgtggtga

SEQ ID NO: 1076 - DNA, 1116 bp, Homo sapiens
  source 1..1116: mol_type = other DNA
atgaccgagaagcggctgtttagctgggagctgctggaagatagcaccgagaacaagctcaagtacttcaaggacgtgatcatccctcaccggaacatcaagaccatcctggaacagctgctgaagaacgccatcgagcccgatgatgccctggtgtacctggtgtttggagtgacaggcgtgggcaagagcagactgaaggccgagttcgagaagagactgctgagacacttcgaggccgagatcattgccaatcctggcagcctggttgtcggcggaattgaagtggatggcgccgaaggcggcaagttcaactacagcgactactacatccaggtgctggaaagcctgcaagaggtgctgatcgactacaaagagaactacgagatcgacgaggacgacaacgaggacaacctgagaggcgatcacgagggcaagaacagcaaggccctgcggagaaccatgcagaaggtgttcacccaccggcagctgaaggcttacacactggatgaggcccagcatctgttcgacgttgcaggcggcagacagatcaacgtgcagatgaactggctgaagtctatcgccaacaagacccagaccgtgcacgtgctgttcggcacctacgatctgctgaagtgccaagaagtgaacggccaagtcggcagaagaagcgaggactactacctgcctccttactacctggacaacagcgacgaccagaaagagttcaagaaggccatcaacaccctgcagcggcacttccccgtggaaaatgagcccgagctgaacgagaagtgggagtacttcatggaatactccatcggctgcatcggcatcctgaagtcctggtggtacagagccctgaagaatgccctggacgatggcgccaagaccgtgcggatcaaggatttccaggccagagagctgagcagcggccgcagaaagaccatcaagaaagaactggaagatggcgagcggcggctggccgctctgtactttgaggaaaaggccaagaagcccaagagcgagagccaggccagcagcaagtccagcacaagaaaagtgggcgagcgcaaggccatccgggatctcgtgggagtgaatcaagagggctga

SEQ ID NO: 1077 - DNA, 639 bp, Homo sapiens
  source 1..639: mol_type = other DNA
atgatcgcccctctgatcctgtacctggatgtgcccttcgccaccttcagagagtctcacgccagagagatgggcaagacataccccgttcctccaccagccacagtgtacggcatgctgctgtctctcgtgggcgagacagacgtgtacagacactgcggagtggaactggccattgccatgctgagcagccccaagaagtcccggatcctgcggcagatgcggagattcaagaacgccgacttctctcaccccgagaacgtgatcccttgctaccaagagatcctgagcaacgtgaagtgcctgatctgggtccgaagcgacggcgagaagatcgagctgagcctgagagagagaatcctgctggccttcgatcaccccgaactcgtcagaagattcggctgcctgtttctgggcgagagcgaccagctgatcaagaccatcaagctggtgtcccaggactaccctgagggcgttagacagtgggccatcagagacaaccggggcagactgacactgccctattgggttgaccacgtgggcagcagaaatacccggttcctgagataccggatcgaggaaatgcccagcagcctgcctcctgacctggcctggacaatgatcacaagccccatctga

SEQ ID NO: 1078 - DNA, 663 bp, Homo sapiens
  source 1..663: mol_type = other DNA
atgacagccatcctgctgcagagcgaggaatacgtggacctgaccttcaagctgagaggcgccctgattcctctggacaacggctacgtgatctacagcgccctgagcagaatctgccccatcctgcacgagctgaagtccatcggcattcaccctatcgccggcattcccaccaagaacaacctgctggaactgaccacacagagccggctgaagatcagaatctaccaccagcacatccctctgatctacccctacctggccggacaggcctttcacatcggccagaacttctaccagctggacatccccgactacaagcccctgatcagcagcgagagcgtgtacagcagactggtcatcatcaagggcttccaggacgccaccaacttcatcgaggctgtgcagcggcagctggataacctgggaatccagggcaagatcgagctgctgaccagacaggatggcacccctcagaagagacagctgaccatcaacaaagagggcaagcagttcaagattcgcggcttcggcgtgaagatctccgagctgaaccctgaggacagcctgacactgcaagagcaaggcatcggcggcaagcggaagatgatgtgcggcatctttgtgcccgccaccagatccaaagaggaagaggaaacctga

SEQ ID NO: 1079 - DNA, 969 bp, Homo sapiens
  source 1..969: mol_type = other DNA
atgatgagccagaagaagaacgacaacaacatccccaactactacctgtacggcaccgtgctgaccagatacggactggccagcctgaaccacgacatgcggagaggcaacaagaccacactgcagaaaggctactggaacggcaagatccacagcttcgtgggcgccaacgccattagatgggccctgaggttctatctgcagaaacagggctacctggtcaacagagtgtgggacgaagatgagcacatcaacagactgaccagcgaggacttcgaccccgagcagttctacgacgacgacatcttcggcttcgccctgctggaaagcgccgagacagaggaagagacaagcaccaccaagaagaaaaagaagcagaaaaccgtcagcagccccaaccagagaattggcgccctggccatgaacatggccgtgtctctgacaccttacgatggcgccgtgaagctgggagccaagagcggcagagataaggacagcaccagcctgcacttcaccgagtaccacgccaccagataccagtactacttcggcatcaaccccacacacctgaaagagatgagccggatcctgcctctgatcgacggcatcatggacatgcctaaagtcggcggcagcagcaatatcttcaactacagcttctgccccgacagcctggtgttccagtggaccaatcacttcgccagctacatcagctactgcttcgagtactgcgaccccaagaccaaagaggccaagctggcccaagagttcatcgacgaggtggaatgcggccagatcgaccctagcacactgtggatcggcggcaccatcgtgaaagagctgaagcagctggacaacttcgacaacagccccttcaacagagcccacatctaccggaaccggaacgagctggtggaagccctgaaggccgtgatcaagagagatctgggcctgcaagagtccaagtga

SEQ ID NO: 1080 - DNA, 1536 bp, Homo sapiens
  source 1..1536: mol_type = other DNA
atggtggccacacagcccaagatcagcctgtctctggatgccgccgacaccaccattatgcacagagccggaatgaccggcctgtacatgaccctgaagcggctggaaaagcagtacaccagcagcagacagagaggcggccacatcagctggtttctgaccgccgataccatcaagctgttctgggagggcagcgactttgtggccctgagctggctgatcaaagagagctttcagctggacgacaccggcctgattcacctgacagccctgtctaacgccgccatcgacctgagacagaagatccacatccacgagggaatctgcgccgtgttcctgcggcacaaccagttttaccaggccggcaagatcgtgaacgccgagctgacagtggaagagaagaaggtggaataccggtacaagagcctgacttggtacgcccaccagaccttcgccgagaagctgtgcgaagccgatacacagcagctgcgcgaggactacgtgcagatgacaagctggctgtacctcggcggaattgtgcggcatgccagaacacagaacaccaccaagctggaagaaaagcccgagtacgccctggctctgctgtttgtgcctgtcgtgtgccactactgcctgctgcacatccctagcgaggacctgaaagagaaaaagccccacagatacggcgtggtcatccccgagatcaacgacttcgaggatgccagccagagaagatggcggctgcagcagctggaaacaaagcagctgaacgtgtccagcctgggcgaagccggcctgctgtactatagcctggacgatatccagcctgaaggcggctactaccaggcctgtcaagtgtggctgtacgagaagatgaacaaggacagccggcagcggaccctgatgagcatcgaagagatcgaggtggacaagaacaccctgatcacctaccagcaggtccagaagtactttcagaccaattaccagcagatcaagcccaagcagatcttcatcaaagtgaaccccatccggtccatcattgccgacaacctggtcaagggcatccactggtggagcgatttctgggagaagctggtcatcgaggacagcaacgagtacctgttcaaccagctgttcttcaaccgcgagggcttcatcatcatggccgagaacagcgaagaggacaagcactacctgatctttctgaaggtgttccagcaggccatgaagggcaacttcgccaagatgtacgccaaggccgaggccggaaaggaccctcctatcaagaaaaaagtggaacggctgcgggccgaactgaactactgctacgatgagctgagcttcaaagagtacctgagcgacttcctcgtcagaggcggactgaacaagtacttcaatcagcaccaagaggaaatcgccctgctgatcaagaagatcccctggcaagagctgcggatctggtccctgctggccattgccagctacaagcctaaggacaagcccatcgagatgaacgacgagagcgaggaagagtga

SEQ ID NO: 1081 - DNA, 990 bp, Homo sapiens
  source 1..990: mol_type = other DNA
atgaccatctacctcgagcactggtctatcatccctctggaaatccctcagcggagccggctgtttagcctggaacctgtggctgtgggcacaagctatgccgagagcctgagcagctacctgcacagactggcccaggctcactgcctgaccacacagaaactggtcatgggcgagatcgcccctctgatcctgaaggacgaggaaaagtctgagctgctggccaagaacctgagccatctgctgggcaacagagatgccaagcctgccatcaacggcatgagagagatgaccggcaagctggtcaccgtgctggaagaactgaccatgtgccaggacctgcggtttctgacactgctgagctggaagggcatgatctacgacaagggcctgttccgcaactacagagcctggtgtccttgctgctgggaaggctggaagcaagagaacaagacaatctacgagcccctgctgtggtccttcaaggacatcgagttctgtctgatccacaagcagcggctgatcgaggaatgccctcactgtggcagcagactgcccatgatggccagattttctccagccggcttctgcagccactgctatggatggctgggccaagagatcaagggcgaagaggaaatcgagaagtaccgcgtgaacatccagggcatctccgagctgattgccctgacaccagagctgggctacaagcccattcctatcgagctgacccggaaactgcagctgatcctgctggtgttcgagcaggccatcggcaaggatctgcagctcctgggagatctcggcggcatcatggaaagcctgagaatcgccagcaagaccaaccagagccagccttaccacctggtcaagctgatcatccccgtgtgcgagaaggccaagatcagcgtgtcccagctgttcggcagcgacttcaaagagctgggaaagatcctgtttggcaacttccggctggaactgaagctgtga

SEQ ID NO: 1082 - DNA, 2790 bp, Homo sapiens
  source 1..2790: mol_type = other DNA
atgctgagcgacatcgagttcgagcactggtgcagacggctgaacctgtctgagcaggcccggaaagtgatcgagcagatcagaaccagcgagcccagcagaagagtcggcggaggcaagaaaaacgtgtccggcagataccccagcagcaagatgggagtgtccatccagttcgagagccacagaaacgagctggcccacatctacaagctggaaaccgacgacgacgtgctcgagtactacgaccagcctcctcctatcttcctggactacctgagcaagaacggcagacggaactaccacagccacacacctgatttcttcgtgatcagaaagagcgccgctggctgggaagagtgcagcgtggaacagaacctgctgaagaaggtgcaggacagccccaaccggtggcagagacaagaggatggcacctggatctgcccacctggcaaagagtacgccgctcagttcggcctgtactacgttgtgcggtctagcgccgagatcaacagcatcttcctgcggaacttcgtgtggctggaagattacctgaacaaccagcagctgaccgtggacgacgagatcaccgatgccgtgtgcaacctggtcaagctgcagcctggaatcagcctggccaacatcatctaccagatcaaagaggccagcatcgacgacctgaacaccctgatcgccaccaaccaggtgtacgtggacctgaatacctacctgctggcccagcctgagaaagtgaaggtgttcctggacgaggaagaggccttcaccttcaaccagatcaccaaggtgtccgagcctcaggccattaacaagctgggcatcttcaaggccagcgtgggcaccagcatcttttgggatggctccaagtgggagatcgccaacaccggcgagaagtctatcgccctgatcacccaggacggcaagttcatcgacctgcctaaccacgtgttcgagacactcgtgcgggacaagaagatcaccagcctgcagacccctgaggaacccaccatcaatagcgaggtggaagaactgctgcggaaggccagcaccgaggacagaaaagaagccaccagccggtacaaggctatcgaggccttcctgaacggcaacagcagcaacaagcccaacagatcccagcggagatggatcgccagctaccggaaggccgagaaaacatacggcagaggcttcatcggcctgctgcctaagcacagagacaaaggctggcggagacagggcatccctgaagaggtcctgctgttcatgcagcagcacatcgagatcaattacgagaacatcaagcagcacagcatccggcacgcctaccagagcttcaaggacctgtgcaacgagaagggctacaagcctcctagcagcgagagctacagacaggccgtgcggaacagaccccagtacaagcagattcagaaacggatgggcgacagagccgcctacaaagaggaacccttctactggtacatccaccgcgaggaaacacctccacacggcgacagacctttcgagatctgccacatcgaccacaccgaagtggacgtggaactgctgtccgccatcatgctgaagctcggcatggacatcagcgtgatcaaagaaaaggcctccatgggcagaccctggctgaccctgatgctggatgcctacagcagacggatcattgccgcctatatgaccttcgacagcccctcctaccggtccaacatgatgatcctgaagatgtgcgtgcagagatacggcaggctgccccagatcattgtggtggatggcggagccgatttcggcggcacctactttgaaacactgctggcctacttccgcgtgaccaagaaagaaagacccgccgctaaggccagacacggctctgtgatcgagtcctactttggcgtggccgacaaagagttctggcacaacctgatgggcaacacccagatcacaaagaacgtgcggcaagtgaccaagtccgtgaatcccaagaacaacgctgtgtggaccctggccaagctgtactcctacttctgcgagtactgctacgagatctacgacacctgtcctcatcctgctctgcggatgtctcccagagaggcctttaacatcggcaccgccagaagcggcagcagagagcacaccttcatcaacgaagaggaattcaagttcctggctctgccctctccaaccgatagcgccggcaccagaaagatcacacaagagggcgtgaagatcaactacctctactactggcacagctgcttcagccggttcagaaacatcaaggtggaagtgaagtacgaccccttcgacatcacacaggcctacgcctacatcaacggcgagtgggtcaagtgccacagcctgtacctgagagagctggaaggccacagcgagcgcgagctgatgattgctgctgccgagctgaagaaactgaaccggatccagaacaagcagttctccgacatcaccggcaagaagctggccgagttcttccggcggatcgagatggaagaagccgctcttgctcctccatggctcgaggccaaaaaagccgtgctccagcagagactgagagacagcgagctgaaacaggtgcacgcccagatcgagggcaagatcgatgagagcgagacaatcaccagcaccaacgtggaaaacagcgcctttatcaaggccgagcacctgaccaagcagtttaccgagagcagccagcaagagctggacgatgagaacctggtggaaagcttcgagcccctggaagagtggtga

SEQ ID NO: 1083 - DNA, 1185 bp, Homo sapiens
  source 1..1185: mol_type = other DNA
atgagcggccagtacagattccctctggaactgctggaacagcctcctcagaagcggctgcagttcttcaagaaccccggcgtgaccatcatgcaccacaacctgaagaacgccttctacaagctgcaccggatcatcagagagccagccggcagctctatcatcctggttatcggacctagcggcgtgggcaagtctacactgctgcagctgctgaagaacaagatcatcgaggaatccctgggccagatggaagccgatcctggctggatccctatcgtgtgtgtggaagctcctgctcctgccaagggcaccttccggtggaagatcttttaccgcaagatcctggaagccgtggacgagcctggcatcgaccagaagatcaactacaacagcgacggcatccggcgggactctgatggaaaactggcctttggagccaaggccaccgaggacagtctgagactggccatggaaaaggccctgatccacagacggccctacacactgtccgtggatgagttccagcacatcggcaagatggccagcgaacagctgctgcaggcccacatggattgtgtgaagtccgccgtgaacaccaccaagattccctggaccggcttcggcacctaccagctgctcaacttcctggaactgagcccacagctgagccggcggacaaagatcatgcacatccccagatacctgctggaaaaggacgaggacatccaagagttcaagcgggtgctcgaacatctgcagtacagaatgcccctgcaagagacacctcctctgaaagagaagtactgggagttctgctacgagcggagcatcggcaatatcggcaccctgaagaattggctgaccgacgcctatgacctggccgtgttcgaggatgccaacacactgaccctcgagcacctccaagagacagccaagagcagctctgagtgcgagcagatggccctggaagctatcgagggcgaagagaagctgaccgatagccaggacaagagcaagagcctgagaaccatcctgggcctcgccaaggacgagacacagaacagcaacaagtctagcacccacgtgcaagagcacaaccagaagtctcagaagtcctccaacaagaccaaggccttcaagcggaaccccagcagagatcctgttagaggcgagcccgtgtga

SEQ ID NO: 1084 - DNA, 630 bp, Homo sapiens
  source 1..630: mol_type = other DNA
atgatgatcgccctgagagtggacgtgccaatcgccagctttcccaccagcagaagcagagagtaccgcgagacataccccgtgcctccacctagcacagtgtacggcatgctgctgtctctcgtgggcgagacagaccggtataagcactgcggcgtgaagatcgctctggccctgctttctgagcccgccaagagcatcaccctgagaaagaccagacggttcaagagccagaagatcgaccacaaagagaacacccggcctgacttccaagagatcctgaccggcatcgagttcatcgtgtggatcgacaccggcgacgatctggctcagcctgacctgtgcgatagaatcaccggcgcctttgccaatcctggcagcgtgcagagattcggcctgctgtgtctgggcgagtccagagatctggtcaacagcatcgatctgctggccaccaccgacttcgaacagcctctgcagtacctgatccaggacgactacggctacctgagcctgccttactgggttgacagagtgggcagcagcaagacccggtggctgaactattctctggaagccctggaagtgcagcagcctcctcatagcgcctggaccaaaattcaggccccttga

SEQ ID NO: 1085 - DNA, 651 bp, Homo sapiens
  source 1..651: mol_type = other DNA
atggctatcgcccaagtgggcagagaggaacagcacgaggaaatcgagctgattcagaacccctacatcgagctggcctttccagtgatgggcaccagcctgcctatcgaccacggctaccagctgtactctgccctgaagtaccggctgatgcagctgaaggactgggacgacatcagcatcaagaccatcagcggcaagtgcgaccggcacaagcggaacgagatcaacctgaccaaccggtccaaactgctcgtgcggctgccttctgagaaggtgcccttcgtgtacagcttctccggcaagagcctgaccatcggcaaccacaagatcagactgggaatccccaacatgaactttctgcagcccaagagcaagatgcggagccacatcgtggtcatccggggctacgaggaacccaagacctttctggaagccgccaagagacagctggacgccctgaatatccaggccgacatcaagctgatctccaaccaggacggcacccctaagagaaagacaatcgccgtgaagcagaccctcgtcggctttggcattgaggccaatcacctgagcgaggccgatagcatcaccctgcaagagaaaggcctcggcggaaagcacaagatgggctgtggcgtgttcgtgtga

SEQ ID NO: 1086 - DNA, 1011 bp, Homo sapiens
  source 1..1011: mol_type = other DNA
atgaccttctacctgtacggcaacatcctgaccttttacggcgtggccgccaacaacagaggcgagaaccagggcaatatcagcaccctgcagaaactgctgtggaagggcgagacacacaccaagattagcgccgaggccatcagatgggccatccggtactattggcagaaagccggctaccaagtgaacagagtgtgggacgacgaagtgaacgactacacctggcaggaccccaagttcaaccctctggacttcatcgacgacgacctgctgggcttctttgaggccgagagcgccaagaaagagcccgagaacgcccctaacaagagccagagcgagaacgtgaacaacgagccccagcctgagaatgccaagctggaaaacaccaaccagagcaagagcaagaagaagctgcccaagaagctgaagcccaagggcagcgtgacccacagaaagggcagactggatgtgacccgggccatcagcctgctgccttacgatggcaacgtgaccttcaacgccaagagcggcaccaagaccagaaccagcatctacggcaccgagttccacgccaccagataccagtttggcctgggcatcacccctgagagctgccaggataagtctagagtgctggccctgctggatgccctggtgtccatctgtagagtcggcggcaaccacggccggtttctgttcgattttgcccctgagtccatcgtgctgcggtggacctctgacttcacccctagatttctgtactgcttcgaagaggacgagatggacaacatctgcaccccagagctgctgcggcagatcagaagcggagatctggaacctaccgagttctggatcagcggcaagatcgccgagaatctgcagggcagcgagtacagcaaagtgaaccagttcagcggcatcaaggccatggtggacgccctgaagcagaagatcgcttgcgacctgcagttctgcctgctggaccagaccaatcggggcgagaattga

SEQ ID NO: 1087 - DNA, 1698 bp, Homo sapiens
  source 1..1698: mol_type = other DNA
atgatcgtgaaggccgacgagcccaagatcgagatcagcctgtctgaccccggcatgaccatgctgcatagagctggtgttgccggcctgtacatgagcctgaaagccctggccaagagataccccacactgaagtcccggcagggcaactttcagtggaccctgaccaagaacagcatcagcctgaactggaagggcaacgactacgaggccctggactggctgttcagcgagagctttcagatcagcagcgacggcctgatctctctgacaggcctgcagtcccctaactgggaaacacagctggccatccacgtgggaatcaagaacaccttcctgcagcacaaccagttcttcagaagcgccgaggacgccatcgagagcctgaccatcgacaacctggaagtgcagatcgagtacaagaaagtcaagagctacgcccaccagtactacgccgagcagctgtgccctatcgagcggctgaacttcaagcggatcttcaccaagctgcggctgttcatcttcatccactataccctgatcggcttcctgttcctgtacgagatccggcaaggcggcaatctggaacagaacgtcgtgggcatcaccggctggctttatcctggcgccacagtgaagcactacgcctaccagaaagagacacagttcaccgagacactggaacgggctatcgccctgctgtatgcccctgtggcctgcctgtactttatcgcccctaagagctacctgtacgacaccaagacacagtactgcctggtcatccccgagatcaccgacctgaagtcttaccccagacagcggcagaagctgaacaactggaactaccagcagttcctggccagcggctatagcgacgctggattcagactgctgacccagcaggccactctgcggattctgcagcagaacaacctgaagcggtgccagatcatcaccttcggccagacacagtggaccaggttccagaaaatccggaagaacgtggaagtgatcgagctgaccgacaagatcatcaagaactaccggctgtgcgaccggtacttcaagaacagagtggtggaatgggaggacggcaacttcattgccgccagcattgtgcgggaactgatcgccgagaatctggcccgaggctttagctggtggcacaactttacccacaccgtgcggagcaacaagctgttcagactgatcagctacgagaaaaagggcctccagcagatggtcaagaataccgactgggacgaagaggcccagaaactgttcgtgcaggcttgccacaaagccctgcaccagatcagaggcaagctggcctccaaggccaaagaggacgagtacgtccagttcgagagagagaacgagcggatccggtccagcctgatcagatgccagaacagcgaggacctgagacactttctggccaccttttggagcaaggccggcatcattagcctgctgtctcagcactggcagcagctgatgcctctgaccaccaagcctagcaactggaagctggccagagatctggctctgctggccctggcctcttacacaacacctgagggctacaagcagaccagccaagaagagaagcccaaggacgtggaagatcggaagcccgaccaagaggaaaccagcagcagcaccgtgaaaacccaagagctgagcgaggaagagtga

SEQ ID NO: 1088 - DNA, 1023 bp, Homo sapiens
  source 1..1023: mol_type = other DNA
atggccgaagagggcaagctgaaccggtacaagcacctgatcttcagcaaccccatcgacttccccgagacaagctgcctgtacagcctggaatctatcgccgtgggcaccccttacacagagagcctgagcagctacctgaaccggctggcccaagagcactgtgtgacccctcagaaactgatcatgggcgagatcgcccctaccatcctgggcgataagtacgcccctgagatcttctccaagaacgtgtccagcctgttcggcaacagcgacgccaagcctgccatcaacggcatgagagagatgacacggtccctggtggacgccctggaaaagctgacactgagacaggacctgcggttcctgagctgcgtgacatggaagggcatcatcagcgaccggggcctgttcagacagtacaaggcttggtgccctctgtgcttcgagacttggagacaggcccggaagctgatctacgagcctctgctgtggtccttcagagaggtggacttctgccctgagcaccagtgcgagctgtgcgatagatgccctcactgcgacagcttccagaaggccatctccgatttcagcgtgcccggctactgcagcagatgcagacactggctgggcaagagcgacaacaccaagagcagcctgcaagaggacttcaagcagaaccacttcatcctgcaaggcatcggcgacctgatcgccctgacacctcagctgaagcaccagcctaacctgaagtccctgaagcacaagttcaagctgatcctgttctgcttcgagcgggccatccaccacgatctgggacagtatgtggtgctgattaagctgatcgagaagctcaagatcgacctgaagcagaattacttcaagcccatcaacctgaccgagatcatcatccccgtgtgccagcaggccaagatctccgtgtctcagctgtttgagaacaactacgagaacctggctcagattctggcccagaacatcgagacagactacaagatcctgtga

SEQ ID NO: 1089 - DNA, 2736 bp, Homo sapiens
  source 1..2736: mol_type = other DNA
atgctgagcgagaacgacttccagcattggtgcgaccggaacaagatcagcgaggaagccaagcaagagatccagatcatcagaagcagcgagcccagccggaaagttggcggcggaaaaagatccgtgtccggcagatacagcagccagaaaatgggcgtgaccatccagttcgagagccacaaggtggaactgcccttcatctaccagctggaacacgacgaggacgtgctcgagtactacgaccagcctcctccattcaagctgagctaccagagcgagagcggcaagaatatcggcttcttctacacccctgatttcttcgtgatccggaccgactctgccggatggtgggagtgcaagaccgaggaaaacctgcagaagctggcccagaagaaccccaaccggtacttcctggacgacgacaatcactggcggtgtcctagcgccgaggactacgccaatagattcggctgggacttcagcatctggtccagcgcctctgtgaactggaccatgcagcggaacctggaattcctggaagattactaccggctgcggggcagaaagaagctgaacgagagcagctttatcgccatcatcagcatcatcaaggccaagcctggcatcaccctgctggaactgtttcacgtgtccgagaacatcgaggccgacgacatctaccacctgatcgcccaagagacaatctacctggacctgagcgtggcccctctggtggaacctgagaagtgcctgctgttctgcgacagagtgacagccctgagctacagcgccatcacagccagccaggccaccaacaataccgtgatcagccccatcatcgacctgaacgtgggcaacatcgtgatctacaacggcaaggccctgacaatcgccctgatcggcgaggacaatatcctgctgcagaccgccgagaaccagagcatcgagttccctcaggacaccttcgagaacctgatccggcagggcaagatcaccagcttccagaaaacaaagaccaacgagatcgaccctcaggctctggaactgctccagcaggcctctgagaaggacctgaaggacgccaactaccgctaccacagcatccagccttacctgaacggcgagcccatcagaagagacacccctcaagagcggagcctgagaaattggctgagcgcctacaacaaggcccggcaccagtacggctatggctatctgggcctgctgagcttcgagcaccagaagggcaacagaaacagacggctgccccagaacatcctggacaagatcgacgacttcatcgagaaccactacgagacaaagaagcagcccaccaagcagagcacctacgccgcctttgccaacttctgtgcccaagccggcattcccgactgtcagatccctacctacaagaccttcatcaaagagatcaagaagcacagcggctacgagcagaccctgaagagagccggatctagagccgcctacgaactggaacagttctactgggagctgaacctgaccacacctcggcacggcgatttccctttccacatctgccacatcgatcacacccagagcgacatcgagctgcggtgtagcaagacaggcaagagccttggcagaccttggatcaccttcctggtggacgccttcagcagatccatcctggccgtgtacatcacctacgatcctccaagctaccggtcctgcatgatggtgctgagaatctgcgtgcagagacacggcagactgccacagaccatcatcaccgacaatggcaaagagttccacagcacctacttcgagacactgctggccatgttcgagtgcaccctgaagcacagacctgccgccaagagcagattttccggcgtgtgcgagagactgttcggcaccacaaaccagcaactgctgtacaacctggccggcaacacccagatcaccaagaaagtgcggctggccaccaagagcgtgaaccccaagaatctgagcctgtggaacatcggcctgctgtacctgtatctgtgcgagtgggcctacgaggtgtacgaaaccacagagcaccctgctctggacggctactctcctagagaggcctttatcaacggcgtgaagcagttcggcaaccgggacctcagaagaatcgcctacgacaacaacttcaagatcctgacactgcccaccaccagccagggcaaagctaaagttcggcctggcaagggcgtgaagatcgagtacaaggactactggcacaacgccctgagggaccccgagatcgagaacaactgggtcgacgtccgctacgaccccttcaatgccggaattgcctacgtgtacgtcagaggccagtgggtcgagtgcatcagcgagtactatcctctgttccggggcagatccgagaaagagattagactggccaccgccgagctgaagaagcggcaccagaatcaccacggcaattacaagatccgggccaagcagctgggcaacttcctggccaagaccgaaaccgaagagatcctgctcgaacagcggctgagagatgagcagacacacgaggtgttcagagtgatcgaaggcggcacccctaacgtgctgcctttcacaagccctaccatcaccgtggaagagacagtgaacacccgcagcaagcccaacatgccagtggaagaaaagagcagcagcgacgccatcgagcctccaaagttcaagcggttcaagaagtactga

SEQ ID NO: 1090 - DNA, 1191 bp, Homo sapiens
  source 1..1191: mol_type = other DNA
atgagcagcgagagagagttccctctggaactgctgaaggccaacaaagagcaccggctgaactactacgacgagtataccatggctcacccctttctggaccgggccttcgaggatctgaagcctctcgttagacactgcggcgagacacggctgatcttcatcgttggaccaaccggcgtgggcaagaccaagctgagacagctgaccgagaagtggatcctggaaaagctgtgggagagcatccggtccaacatgggacatctggccgtggcctctgtggaagccgtgctgcaaaagagcggcctgttcaacgccaaggaccacctgaagagatgcctgtacgccctgcacgagcccgaggaattcatcaagaacaagatcaactacggcgtggacggcatctacagaaccgacgagggaaagctggccatcaagagccggattctggaaaccgatctcggctgggctctcgagcaggccctgaaacatagacaccctcagatctttttcatcgacgaggcccaccatatgctggctgtggccagcggaagaaagctgacagaagtgcccgaggccattaagtccctggccaatagaaccgaggtgctgcacggcctgatcggcacatacgatctgctgacactgcacgacatcggcgaccagctgagcagaagaagcctgtacatccatctgcctagatacgacgccaagttcatcgaggacagagaggactggcagagcatcgtgtggaacttccagacacagatccccatcgaagaggaacccgacttcgtgtccgactgggagtacctgtacgagagaagcctgggctgtgtgggcatcctgaagaactggaccagaaacgccttcgccgacgccatggaagatgaggccaagaccgtgacactgaagcacctggaaagacgggccctgagcatcggccagtgccggaacattctgaagaagatcaaagagggcgagaacaactacgccgccatcgagggcgaagtggaaaaactgagaaccgagctggaactgggcatcgagcccatcagcagaacccagcctatcagccagagctacagcggcgccaatcagaccgcctctcagaagcctaagagcaagcaggccgtgggacagagaagggccaagagggatagagtgggaatcgacaaggacgccggctga

SEQ ID NO: 1091 - DNA, 639 bp, Homo sapiens
  source 1..639: mol_type = other DNA
atgatcgcccctctgatcctgtacctggatgtgcccttcgccaccttcagaaagtcccacgccagagagatgggcaagacataccctgtgcctccaccagccacagtgtacggcatgctgctgtctctcgtgggcgagacagacgtgtacagacactgcggagtggaactggccattgccatgctgagcagccccaagaagtcccggatcctgcggcagatgcggagattcaagaacgccgacttctctcaccccgagaacgtgatccctggctaccaagagatcctgagcaacctgaagtgcctgatctgggtccgaagcgacggcgagaagatccagcctagcctgagagagagaatccagttcgccttcagtcaccccgaactcgtcagaagattcggctgcctgtttctgggcgagagcgaccagctgatcaagagcatcaagctggtgtccgaggactacctgggcgaagccagacactgggtcatcatggacaatcaaggctggctgaccctgccttactgggtcgaccatgtgggcagcagaaatacccggttcctgagataccggatcgacgagatggacaagctgagccctcctgagaaggcctggaccatgattcagagccccatctga

SEQ ID NO: 1092 - DNA, 669 bp, Homo sapiens
  source 1..669: mol_type = other DNA
atgacagccctgctgatccccagcgaggaatacgtggacctgaccttcaagctgagaggcgcccctattcctctggacaacggctacgtgatctacagcgccctgagcagaatctgccctagcctgcacgagctgaagtccgtgggcattcaccctatcgccggcattcccaccagaaacaacctgctggaaatcgccgctcagagccggctgaagatcagaatcttccaccagcacatccctctgctgtacccttacctggccggacagggctttcacatcggcaagaacagctaccagctggacatccccgactacaagcccctgatcagcagcgagagcgtgtactccagactggtggtcatcaagggcttccaagagcctagcaacttcatcgaggccgtgcagcggcagctggataacctggaaatccagggcaagatcgagctgctgacccggaaggatggaacccctcagagaaggcagctgagcatcagcaaaggcggcaagcagttcaaagtgcgcggcttcggcgtgaaggtgtccgagctgaatcctgaggacagcctgacactgcaagagcaaggcatcggcggcaagagaaagatgatgtgcggcatcttcgtgcccgccacacgcaacaaagaggaaaaagagacaatcacctga

SEQ ID NO: 1093 - DNA, 960 bp, Homo sapiens
  source 1..960: mol_type = other DNA
atgatgagccagaagaagaacgacaacaacatccccaactactacctgtacggcaccgtgctgaccagatacggactggccagcctgaaccacgacatcagcagaggcaacaagaccacactgcagaaaggctactggaacggcaaggtgcacagcttcgtgggcagctctgccattagatgggccctgcggttctatctgcagaaacagggctacctggtcaacagagtgtgggacgaagatgagcacatcaacagactgaccagcgaggacttcgaccccgagaagttctacgacgacgacatcttcggcttcgccctgctggaaagcgccgagacagaggaagagacaagcaccaccaagcggaagaaaaaaaagaccaaggtgtccagccagaaccagagactgggagccctgggcatgaacatggccgtgtctctgacaccttacgacggcgccattaagctgggcgccaagtctggcagagagaaggacagcaagagcctgcacttcaccgagtaccacgccaccagataccagtactacttcgccatcaacgccacacacctgaagggcttcagccggatcctgcctctgatcgacggcatcatgaacctgcctaaagtcggcggcagcagcaatatcttcaactaccctttctgccccgacagcctggtgctgcagtggaccaatcacttcgccagctacatcagctactgcttcgagtactgcgaccccaagagcaaagaggccaagctgaccaaagaattcatcgacgaggtggaatgcggccagatcgaccctagcacactgtggatcggcggcaccatcgtgaaggatctgcagcagctggacaacttcgacaacagccccttcaagaaggcccacatctaccggaaccggaacgagatgatcgaggccctgaaaaccgtgatcaagcgcgacctgggcctgaagtaa

SEQ ID NO: 1094 - DNA, 957 bp, Homo sapiens
  source 1..957: mol_type = other DNA
atgatcgccacacagcccaagatcagcctgtctctggatgccgccgacaccaccattatgcacagagccggaatgaccggcctgtacatgaccctgaagcggctggaacagcagtaccctagcagcctgcagagagtggcctacgttagctggctgctgaccaccgacaccatcaagctgttttgggagggcagcgatctggtggccctgagctggctgatcaaagagagcttcaagctggacgacaccggcctgattcatctggccggcctggaaaacgacgagatcgacctgagccacaagatccacatccacgagggaatcagcgccgtgttcctgcggcacaacagattctacaaggccggcaagctggtggacaccgagctgacactggaagaacagaaggtggaataccagtacaagagcctgacttggtacgcccaccagaccttcgccgagaagctgtgcgataccgacacacagaaactgagatgcgactacgtgaagatcaccagctggctgtacctcggcggaattgtgcggcacgccaagacacagaacatcaccaagctggaagagacacccgcctacgccttcgctctgctgtttgtgcctgtcgtgtgccactactttctgtttcacatccccagcgaggacctgaaagagaagaagccccacagatacctgatgctgatccccgagatcaaggacttcgaggacgccagccaaagaagatggcggctgcagcagctggaaacaaagcagttccacgtgtccaacctgggcgaagccggactgatctaccacagcctggacgatatccacaccgaggtggactactaccaggcctgccaagtgtggctgtacgagaaaatgaaccaggccagccggcagagaaccctgatgggcatcgaggaaatcaagatcgacaagaacaccctgaccggccactgctga

SEQ ID NO: 1095 - DNA, 1008 bp, Homo sapiens
  source 1..1008: mol_type = other DNA
atggtcaaccccaagcggatgaccatccacctggaaaactggaacctgaagcctcctaagatccctcagcggagccggctgtttagcctggaaccagtggctgtgggcacaccttatgccgagagcctgagcagctacctgcacagactggcccaagagcactgcctgaccagccagaaactggtcatgggagagatcgcccctctgatcctgaagaacgaggacaagagcgagctgctgaagaaaaacgtgtcccatctgctgggcaacagcgacgccaagcctgccatcaatggcatgagagagatgaccggccagctggtcaccgtgctggaagaactgaccatgcggcaggacctgcggtttctgacactgctgtcttggaagggcatgatctacgacaagggcctgttccggaagtacagagcctggtgtccttgctgctgggaagagtggcggcagaagaacaccaccatctacgagcctctgctgtggtccttcaaggacgtggaattctgcctgatccacaagcagcggctgatcgaggaatgccctcactgcggatctcatctgcccgccattgccaaactgagccctgccggcttctgcagcagatgttatggctggctgggccaagagatcaagggcgaagaggaaatcgaagagtaccgcgtgaagatccagggcatctccgagctgattgccctgacacctcagctgggctacgagcccattcctatcgagctgacccggaaactgcagctgatcctgctggtgttcgagcaggccatcggcaaggatctgctgctcctgggagatctgggcagaatcatcgagtccctgaagatcgccagcaagaccaaccagaaccagccttaccacctcctgaagctgatcatccccgtgtgcgagaaggcccggatctctgtgtaccagctgttcagaagcgacttcagagagctgggcaagatcctgttcgagaacttcggcctggaactcaagctgtga

SEQ ID NO: 1096 - DNA, 708 bp, Homo sapiens
  source 1..708: mol_type = other DNA
atgaaggaacagttcgagcagtgggtcgcccggctgcagatttctgaagccggccagaaaatcatcgagaaagtgcggagcagcgagcccagcagaagagttggcggaggcagcaagaatgtgtccggcagataccccagccggaagatggaagtgaccatccagttcgagagccacagagtggaactgcccatcatctaccagctggaacacaaccaggacgtgctggaattctacgaccagcctcctcagatcaagctggactaccaggccaccaatggcagacgactgggcgtgctgcacaactggaaggccaagtatctgaccgctcagcagaagtacggctgcggctatatcggcctgctgtcccacagaagcgtgaagggcaacagacagagaaagctgcccgaggacaccctggccatcatggaaaagttcatccttgaggactacgagacaatcaagcagaaacggatgagagaggtgtacggcgccctggtgcttgtgtgtgaacagtctggcgtgatcgcccctagctacaaggccttcaccaaagagatcaagcacagacccgtgtacgagcagaccaagaagcggaaaggcagaagggccgcctacaagcacgagagcttttactgggagctgaccaagaccacacctcggcacggcgttagagaagcccatgctgctggactgagccctctgtaa

SEQ ID NO: 1097 - DNA, 1200 bp, Homo sapiens
  source 1..1200: mol_type = other DNA
atggccttcgccaagagaatgccccaggcctacagaccctttgagatcggccacatcgatcacacccagctggacgtggaactcgtgtgtagcagaaccggcagcaacctgggtagaccttgggccacctttctggtggacgcctactctagaaggctgctggccgtgtacctgaccttcgacagccctagctaccggtcctgtctgatggccctgagaatctgcgtgcagagacacgccagactgccccagattgtggtggtggataatggcgccgagttcaacagcacctacttcgagacactgctggccaccttcgagtgcaccaagaagcaacggcctccagccaaggccagatttggctctgtgtgcgagagactgttcggcaccagcaacacccagttcgtgcacaacctcgtgggcaatacccagatcacccggaacgtgcggcaagtgaccaagagcgtgaaccccaagaatcaggccgtgtggacactgggcagcctgtacgagtacctgtgtacctgggcctacgaggtgtacgacaccgatgaacaccccgctctgtttcagagccccagagatggatttgccgccggaatggccatcagcggcaacagagtgcaccggatgatcccttacgacgagaacttccagatcctgacactgcccaccaccaagtccggaaaggccaaggtgcagatcggcagaggcgtgaagatcaactccatctactactggtccaacagcttcagggaccctcagatcgagaacaccagcgtgcagatcagatacgaccccttcaacatcggaatcgcctacgccttcgtcagaggccagtgggtcgagtgcatcagccagtactacgccgagtttcagggcagaagcgagaaagagctgaagctggctagcgccgagctgcggaagagaagctctaaccatgccagacagagccagagctacgccaagaagctggccgaatttctggcctccgtggaagaacaagagggcctgctggaacagcggagctatgatgccgaagccagagaggtgttccggatcatcgatggcggcaaggccaccaccagcagaaacgagcagaccaagatcatccccgccaactttgagaacaccgacacacccgccgaccaggacgaagccctgattcctgatacactggtggtgtacgaggaattctga

SEQ ID NO: 1098 - DNA, 1155 bp, Homo sapiens
  source 1..1155: mol_type = other DNA
atgaccaagagcaccggctttccacctgagctgctgaagcagagcgccacagagagactggcctacttcgagaactacaccgtggctcaccccagactgaaagaggtgtacgacaagctgatgggcacaatcgccgaacctgccggcgctagcttcatctttgtgtatggcgctagcggcgtgggcaagaccacactgagactgagagtggaacagaagctgaccgagctggccctgagcctgctggaatctgatagaggctgtgtgcctgtcgtgggcgttgaagctgtggcccctgagagcagaaacttcaactggaaggactactacacacgggccctgatcgccctggaagaacccctgatcgactacaagttcgactacggcgtgcggggcatcagccgggataacaacttcggcaagatcaacgtggaaagcaaggtggtggccccagctctgagaagggccctcgaaaacgccctgaagcacagacaccccgacgtgttctttgtggacgaggcccagcacttcagcaagatggcctctggacacaagctgcaggaccagctggattgcctgaagtccctggccaacatgaccggcatcctgcactgtctgctgggcacatacgaactgctgaccttcagaaacctgagcggccagctgtctcggagaagcgtggacatccacttcagacggtactgcgccgacaatcccgaagatgtgcaggccttcaagagcgtgctgctgactttccagcagcacatgcctctggccgagacacctgacctggtgtctcactgggagtacctgtacgagagaagcctgggctgtgtgggcatcctgaagaactggctgaccagagccttcaaggacgctctgaaccgggaagccaccaccgtgacactgaaggacctgcagcaacgagcttggagtgtggcccagtgcaagcggatgttccaagagatccaagagggcgaaagacagctgagcgagacagagacagacgtgcagaacctgagatctgccctcggcctggacaccaagcctatcacactgagcgaggaaacccctaagaccaccagacctagccggaaagtgggaaagagaaagcccaagagggaccccatcggcgtgcaagaagatgtgtcctga

SEQ ID NO: 1099 - DNA, 639 bp, Homo sapiens
  source 1..639: mol_type = other DNA
atgacagcccctctgatcctgtacctggatgtgcccttcgccaccttcagagagtctcacgccagagagatgggcaagacataccccgttcctccaccagccacagtgtacggcatgctgctgtctctcgtgggcgagacagacgtgtacagacactgcggagtggaactggccattgccatgctgagcatccccaagaaaagccgggtgctgcggcagatgcggagattcaagaacgccgacttctctcaccccgagaacagcatccctagctaccaagagatcctgagcaacctgaagtgcctgatctgggtccgaagcgagggcgagaagatccagcctagcctgagagagagaatccagctggccttcgatcaccccgaactcgtcagaagattcggctgcctgtttctgggcgagagcgaccagctgatcaagagcatcaagctggtgtcccaggactacctgcagggcgttagacactgggccatcagagacaaccggggcagactgacactgccctattgggttgaccacgtgggcagcagaaatacccggttcctgcggtacagaatcgaggaaatgcctagcagccctcctcctgacctggcctggacaatggtgcagagccctatctga

SEQ ID NO: 1100 - DNA, 663 bp, Homo sapiens
  source 1..663: mol_type = other DNA
atggccgccatcctgatccagagcgaggaatacgtggacctgaccttcaagctgagaggcgcccctattcctctggacaacggctacgtgatctacagcgccctgagcagaatctgccccatcctgcacgagctggaatccatcggcattcaccctatcgccggcattcccaccagaaacaacctgctggaactgacagcccagagccggctgaagatcagaatccaccaccagcagatccctctgatctacccttacctggccggacaggcctttcacatcggccagaatagctaccagctggacatccccgactacaagcccctgatcagcagcgagagcgtgtacagcagactggtcatcatcaccggcttccaggacagcaccaacttcatcgaggccgtgcagcggcagctggataacaagggaatccagggcaagatcgagttcctgaccagacaggatggcacccctcagaagagacagctgaccatcaaccagaagggcaagcagttcaaagtgcgcggcttcggcatcaagataagcagcctgactcctgaggacagcctgacactgcaagagcaaggcatcggcggcaagcggaagatgatgtgcggaattctggtgcccgccacacacagcaaagaggaagaggaaacctga

SEQ ID NO: 1101 - DNA, 969 bp, Homo sapiens
  source 1..969: mol_type = other DNA
atgatgaccctgaagaagaacgacaacaacatccccaactactacctgtacggcaccgtgctgaccagatacggactggccagcctgaaccacgacatgagactgggcaacaagacaaccctgcagaaaggcttctggaacggcaagacccacagcttcgtgggcagctctgccattagatgggccctgcggttctatctgcagaaacagggctacctggtcaacagagtgtgggacgaagatgagcacctgaacagactgaccagcgagtacttcgaccccgagcagttctacgacgacgacatcttcggcttcgccctgctggaatctgccgagacagagagcgagacaagcaccaccaagcggaagaagaagcagaccaagaccagcaccagcaaccagagaagaggcgccctggccatgaacatggccgtgtctctgacaccttacgacggcgccattaagctgggcgccaagtctggcagagagaaggatagcaccagcctgcacttcaccgagtaccacgccaccagataccagtactacttcgagatcaacgccacacacctgaaggactacagccggatcctgcctgtgatcgacggcatcatggaactgcctaaagtcggcggcagcagcaatatcttcaactaccctttctgccccgacagcctggtgctgcactggaccaacaatttcgccagctacatcagctactgcttcgagtactgcgagccccagtccaaagaggccaagttcacccaagagttcatcgacgaggtggaatgcggccagatcgagccttctcagctgtggatcggcggcaccatcgtgaaggatctgcagcagctggacaacttcgacgacagccccttcaagaaggcccacatctaccggaaccggaacgagctgatcgagaacctgaaaaccgtgatcaagaaggacctgggcctcgaggaatccaagtga

SEQ ID NO: 1102 - DNA, 1578 bp, Homo sapiens
  source 1..1578: mol_type = other DNA
atgttcgccacacagcccaagatcagcctgtctctggatgccgccgacaccaccatcatgcacagagtgggaatgaccggcctgtacatgaccctgaagcggctggaaaagcagtaccctagcagcggacagagaggcgagcacatctcttggagcctgaccgccgataccatcgagctgttttgggagggcagcgactttgtggccctgagctggctgatcaaagagagctttcagctggacgacaccggcctgatccacctgatcggcctggacaacgatgccatcgacctgagccagaagatccacatccacgagggaatctgcgccgtgttcctgcggcacaaccagttttatcaggctggcgagatcgtgaacaccgagctgaccgtggaagagaagaaggtggaataccagtacaagagcctgacttggtacgcccaccagaccttcgccgagaagctgtgcgaagtggatacccagcagctgcggcaggactacgtgcagatcacaagctggctgtacctcggcggaattgtgcggcatgccagaacacagaacaccaccaagctggaagaaaagcccgagtacgccctggctctgctgtttgtgcctgtcgtgtgccactactgcctgctgcacatccctaccgaggacctgaaagagaaaaagccccacagatacctggtggtcatccccgagatcaaggacttcgaggatgccagccagagaagatggcggctgcagcagctggaagccaagcagctgcatgtgtctagcctgggagaagccggcctgctgtactacagcctggacgatattcagcccgagggcagctactaccaggcctgtcaagtgtggctgtacgagaagatgaacaaggacagccggcagcggaccctgatgagcattcaagagatcgagatcgacaagaacaccctgatcacctaccagcaggtccagaagtactttcagacaaacgcccagaagattgagtacaagcagatcttcatcaaagtgaaccccattcggtccctgatcgccgacaatctggtgcagggactgtactggtggtccaacttctgggagaaactggtcatggaagatagcaaagagtacctgttcaaccagctgttcctgaaccgcgagggcttcatcatcatggtggaaaacagcgaagaggacaagcactacctgatctttatcaaggtgttccagcaggctatgaagtccaatttcgccaagatgtacgccaaggccgaggaaggcaaggaccctcctatcaagaaaaaagtggaacggctgcgggccgagctgaactactgttacgatgagctgagcttcaaagagtatctgagcgacttcctcgtcagaggcggcctgaacaagtacctgaaccagaaccaggccgagatcctgctgctgattaagaaaaccccttggcaagagctgcggatctgggccctgctggccattgccagctacaagcccaaagaaaagaccatcaacaaggacgacagcctgacaccgaacaaccagaaactggaagaagtgaacgacgacagcgaggaagagtga

SEQ ID NO: 1103 - DNA, 1008 bp, Homo sapiens
  source 1..1008: mol_type = other DNA
atggtcaaccccagaggcatgaccatctacctggaacactggaacctgaagcctctggaaatccctcagcggagccggctgtttagcctggaaccagtggctgtgggcacaccttatgccgagagcctgagcagctacctgcacagactggcccaggctcactgtctgaccagccagaaactggtcatgggcgagatcgcccctctgatcctgaaggacgaggacaagtctgagctgctggccaagaacctgagccatctgctgagaaacagcgacgccaagcctgccatcaacggcatgagagagatgaccgccaagctggtcatcgtgctggaagaactgaccatgcggcaggacctgcggtttctgacactgctgtcttggaagggcatgatctacgacaagggcctgttccgcaactacagagcctggtgtccttgctgctgggaagagtggatgcaagagaacaagacaatctacgaggccctgctgtggtccttcaaggacgtggaattctgcctgatccacaagcagcggctgatcgaggaatgccctcactgtggctctagactgcccgtgatggccaagttttctcctgccggcttctgctccagatgctatggctggctgggccaagagatcaagggcgaagaggaaatcgagaagtaccagatcaacatccagggcatctccgagctgatcgccctgacacctcagctgggctacgagcccattcctatcgagctgacccggaaactgcagctgatcctgctggtgttcgagcaggccatcggcaaggatctgcagctcctgggagatctcggcggcatcatggaaagcctgagaatcgccagcaccaagaaccagtctcagccctaccacctggtcaagctgatcatccccgtgtgcgagaaggccaagatctccctgtctcagctgttcggcctggacttccaagagctgggcaagatcctgttcggcaatttctccctggaactgaaactgtga

SEQ ID NO: 1104 - DNA, 2703 bp, Homo sapiens
  source 1..2703: mol_type = other DNA
atgaaggaacagttcgagcagtgggtcgcccggctgcagatttctgaagccggccagaaaatcatcgagaaagtgcggagcagcgagcccagcagaagagttggcggaggcagcaagaatgtgtccggcagatacccctccagaaagatgggcgtgaccatccagttcgagagccacagagtggaactgcccatcatctaccagctggaacacgacgaggacgtgctggaattctacgaccagcctcctcagatcaagctggactaccaggccagcaatggcagacgactgggagtgctgcacacccctgatttcttcgtgatccggaccaatagcgccggctgggaagagtgcaagaccgagcaagagctgaagaagctggccgagaagaaccccaaccggtacttctacttcgaagaggacaaccagtggcactgccctccaggcgaagtgtacgcccatcagttcggcctgtactaccggatcagaagcgaccgcgagatcaactgggtcgtgcagagaaacctgcagttcctggaagattactaccgggccgagagcctggccgtggaagaagctattgctcagagcctgctggccatcgtgtctagccagcctggaattgtgctggctgagctgctgaatcagcctaccggcgccaagagcgacgacatctataccctgatcgcccaagagcagatctactttgacctgaacgccgctcctctggccgagcctgagagatgcctgatcttcagagatgagcagaccgccaacgcctacagactgatcgtggaaaagcccagcgtgaacctgcctgccatctctcccgtgatcaatctggctaccggcacacccgtgtcctgggatggaaagggcctgaacatcatccacgtgggcgagacagaagtgatcctgggcgccgagaacaaccagctgatcgagctgaaaaaggccgtgttcgagaacctcgtgcggcagggcaagatcacctctctgcagacacctgagaacaccgccatcagcacagagagctggcagcggttttaccaggcctctcctgaggatcaggccgaggctctggaacggtacaagaccatcgagccctacctgaacggacaccctcctgagaacgagacaatccccgccagaaccatcagagactggaaggccaagtacctgacagccctgcagaagtacggctgcggctatatcggcctgctgtcccacagaagcgtgaagggcaacagacagagaaagctgcccgaggacaccctggccatcatggaaagattcattctcgaggactacgagacactgaagcagaaacggatgctggaagtgtatggcgccctggtgctggcttgtgaacagagcagtgtgatcgcccctagctacaaggccttcaccaaagaagtgaagcggcggaccggctacgagcagaccaagaagagacaaggcagaagggccgcctaccagcacgagtccttttactgggagctgacccagaaaacccctcggcacggcgatagacctttcgagatcggccacatcgatcacacccagctggacgtggaactcgtgtgtagcagaaccggcagaaacctgggcagaccttgggccacctttctggtggatgcctactctagaaggctgctggccgtgtacgtgaccttcgacagcccaagctaccggtcctgtctgatggtgctgagaatctgcgtgcagcggcatggcagactgcctcagattgtggtggtggacaacggccccgagttcgacagcaagtacttcgagatcctgctggctaccttcgagtgcaccaagaagcagcggcctccagccaaggccagatttggcagcgtgtgcgagagactgttcggcaccagcaacacccagttcgtgcacaacctgctgggcaatacccagatcacccggaacgtgcggcaagtgaccaagtccgtgaatcccaagaaccaggccgtgtggacactgggactgctgtacgagtatctgtgcgcctgggcctacgaggtgtacgacacagatgaacaccccgctctgtttcagagccccagggatgcttttgccgccggaatggtcacaagcggctccagactgcaccggatgatcccttacgacgagaactttcagatcctgacactgcccaccaccagcgagggcaaagccaaggtgcaagttggcagaggcgtgaagatcaacagcatctactactggtccaacagcttcagggaccctcagatcgagaataccagcgtgcccaccagatacgaccccttcaacatcggaatcgcctacgccttcgtcagaggccagtgggtgcagtgcatcagccagtactacagccagctgcagggcagaagcgagaaagaactgaaactggccagcgccgagctgagaaagcggcagcagaattacggccggcagagtcaggtgtccgccaaaaacctggccgagttcctgacaagcgtggaagcccaagagacactgctggaacagcggagctatgacgccgaggccagagaagtgttcatcgtgatcgaaggcggcaaggccgccacctctagaaacgagcagcccaaactgatccaggtgccattcgagaacacagacacccaggtggccgaggacgaggccattgctcctgaaacactggtggtgtacgaggaattcagcctgtga

SEQ ID NO: 1105 - DNA, 1152 bp, Homo sapiens
  source 1..1152: mol_type = other DNA
atgacccagaccaacggcttccctctggaactgctgaccagacctacacctgagcggctggcctacttcgagaactacacagtgggacaccccaggctgaaagaggtgtccgagatcctgatgcggacaatcgctgaacctgccggcgctagcttcatcttcgtgtatggacctagcggcgtgggcaagaccacactgagactgagagtggaacagaaactgaccgagctggtgctgcccctgctggaatctgatagaggcagagtgcctgtcgtgggcgttgaagctgtggcccctgagagcagaaacttcaactggaaggactactacacacgggccctgatcgccctggaagaacctctgatcgaccacaagttcgactacggcgtgcggggcatcagcagagacaacttcggcaagatcaacgtggaaagcaaggtggtggccccagctctgagaagggccctcgaaaatgccctgatccacagacaccccgacgtgttctttgtggacgaggcccagcactttggcaagatggccagcggctacaagctgcaggatcagctggattgcctgaagtccctggccaacatgaccggcatcctgcactgtctgctgggcacatacgagctgctgaccttcagaaacctgtccggccagctgtctcggagaagcgtggacatccacttcagacggtactgcgccgagaatcccgaagatgtgcaggccttcaagagcgtgctgctgactttccagcagcagatgcctctggccgaggctcctgatctggtgtctcactgggagtacttctacgagagaaccctgggctgcgtgggcatcctgaagaactggctgacaagagccctgaaggacgccctggatagagaagccaccaccgtgacactgaaggacctgcagaaacgcgcttggagcgtggcccagtgccagcggatgttcaaagagatccaagagggcgaaagacagctgagcgagacagagacagacatccagaacctgagatctgccctcggcctgggagccaagcctattgtgctgcctgaggaaacccctaagaccaccagacctccagccaaagtgggaaagagaaagcccaagagggaccccatcggagtgcagcaggatgtgtcttga

SEQ ID NO: 1106 - DNA, 639 bp, Homo sapiens
  source 1..639: mol_type = other DNA
atgatcgcccctctgatcctgtacctggatgtgcccttcgccaccttcagagagtctcacgccagagagatgggcaagacataccccgttcctccaccagccacagtgtacggcatgctgctgtctctcgtgggcgagacagacgtgtacagacactgcggagtggaactggccattgccatgctgagcatccccaagaagtcccggatcctgcggcagatgcggagattcaagaacgccgacttctctcaccccgagaacgtgatccccatctaccaagagatcctgagcaacgtgaagtgcctgatctgggtccgaagcgacgccgagaagatccagcctagcctgagagagagaatccagctggccttcgatcaccccgaactcgtcagaagattcggctgcctgtttctgggcgagagcgaccagctgatcaagaccatcaagctggtgtcccaggactacctggaaggcgtcagacagtgggtcatccgggacaacagaggcagactgaccctgccttattgggtcgaccacgtgggcagcagaaatacccggttcctgagataccggatcgaggaaatggaccggctgagccctcctgacctggcctggacaatgattcagagccccatctga

SEQ ID NO: 1107 - DNA, 660 bp, Homo sapiens
  source 1..660: mol_type = other DNA
atggccaccagcatcaacagcgaagagtacatcgacctgaccttcaagctgagaggcgcccctattcctctggacaacggctacctgacatacgccgctctgagcagaatctgccctccactgcacgagctgaacaacatcggcattcaccctatcgccggcattcccaccagaaacaacctgctggaactgacagcccagagccggctgaagatcagaatccaccaccagcagatccctctgatctacccttacctggccggacagaccttccacatcggccagaatagctaccagctggacatccccgactacaagcccctgatcagcagcgagagcgtgtacagcagactggtcatcatcaccggcttccaagaggccaccaccttcattgaggccgtgcagagaaagctggacaacaagggcatccagggcaccatcgagctgctgacaagacaggatggcacccctcagaagcggcagctgaccatcaacaagcagggcaagcagttcaaagtgcgcggcttcggcgtgaagatctccgagctgaatcccgaggacagcctgacactgcaagagcagggaatcagcggcagacggaagatgatgtgcggcatcttcgtgcccgccaccagaagcaaagaggaacaagaaacctga

SEQ ID NO: 1108 - DNA, 966 bp, Homo sapiens
  source 1..966: mol_type = other DNA
atgagccagaagaagaacgacaacaacatccccaactactacctgtacggcaccgtgctgaccagatacggactggccagcctgaaccacgacatgcggagaggcaacaagatcaccctgcagaaaggctactggaacggcaagatccacagcttcgtgggcagcagcgccattagatgggccctgaggttctatctgcagaaacagggctacctggtcaacagagtgtgggacgaagatgagcacatcaacagactgaccagcgtggacttcgaccccgagaagttctacgacgacgacatcttcggcttcgccctgctggaaagcgccgagacagaggaagagacaagcaagaccaagcggaagtctaagcagaccaagaccagcacacccaaccagagaatgggcgccctgggaatgaatctggccgtgtctctgaccccttacgatggcgctgtgaagctgggagccaagagcggcagagacaaggatagcaccagcctgcacttcaccgagtaccacgccaccagataccagtactacttcggcatcaacgccacacacctgaaggactacagccggatcctgcctctgatcgacggcatcatgaacctgcctaaagtcggcggcagcagcaatatcttcaactaccctttctgccccgacagcctggtgttcgagtggaccaatcacttcgccagctacatcagctactgcttcgagtactgcgacctgaagtccaagggcgccaagctgacccaagagttcatcgacgaggtggaatgcggccagatcgaccctagcaaactgtggatcggcggcaccatcgtgaaagagctgcagcagctggacaacttcgacaacagccccttcaagaacgcccacatctaccggaaccggaacgagctgatcgaggacctgaaaaccgtgatcaagcgcgacctgggcctcgaggaatccaagtaa

SEQ ID NO: 1109 - DNA, 1578 bp, Homo sapiens
  source 1..1578: mol_type = other DNA
atggtggccaaccagcctaagatcagcctgtctctggatgccgccgacaccaccatcatgcacagagtgggaatgaccggcctgtacatgaccctgaagcagctggaaaagcagtaccccagcagccaccagagaggcggacacatttcttggagcctgaccgccgataccatcgagctgttttggcagggcagcgacttcttcgccctgagctggctgatcaaagagagcttccagctgaacgacaccggcctgatccacctgacaggcctggacaacaacgagatcgacctgcggcagaagatccacatccacgagggaatctgcgccatcttcctgcggctgaacaagttctaccaggccggcgagatcatcaacaccgagctgacagtggaagccaagaaggtggaataccagtacaagagcctgacttggtacgcccaccagaccttcgccgagaagctgtgcgacaccaacatccagcagctgagatgcgactacgtgcagatcaccagctggctgtacctcggaggaattgtgcggcacgccagaacacagaacaccaccaagctggaagagaagcccgagtacgctctggccctgctgtttgtgcctgtcgtgtgccactactgcctgctgcacatccctagcgaggacctgaaagagaagaagccccacagatacctggtggtcatccccgagatcaaggacttcgaggatgccagccaaagacggtggcgactgcagcagcttgagacacagcagctgcacgtgtccagcctgggagaagctggcctgctgtactacagcctggacgatatccaggccgagagcgactactatcaggcctgccaagtgtggctgtacgagaagatgaacaaggacagccggcagcggaccctgatgagcatcgaggaaatcaagatcgacaagaacaccctgatcacctaccagcaggtccagaagtactttcccaccaactaccagaagattcagcccaagcagatcttcatcaaagtgaaccccatccgcagcctgattgccgacaatctggtcaagggcatcccttggtggtccaacttctgggagaaactcgtgatcgacgacagcaagggctacctgttcaaccagctgttcttcaaccgcgagggcttcatcatcatggccgagaacagcgaagaggacaagcagtatctgatctttatcaaggtgttccagcaggctatgaagggcaacttcgccaagatgtacgccaaggctcaagagggcaaagaccctcctatcaagaaaaaggtggaacggctgcgggccgagctgaactactgttacgatgagctgagcttcaaagagtacctgagcgacttcctcgtcagaggcggcctgaacaaatacttcaatcagcaccaagaggaaatcgccctgctgatcaagaagtccccttggcaagagctgcggatctgggctctgctggccattgccagctacaagcccaaggacaagcccaccaacaaggacgacaacagctttagcaccaaccagaaactcgaggaagtgaactacgagagcgaggaagagtga

SEQ ID NO: 1110 - DNA, 990 bp, Homo sapiens
  source 1..990: mol_type = other DNA
atgagcatcgacgaggaaatctggtcccctaagcctcctgagatccctcagcggagcagactgttcagcctgaaacctgtggccgtgggcaatccttacgccgagagcctgtctagctacctgcacagactggcccaggctcactgcctgaccacacagaaactggtcatgggcgagatcgcccctctgatcctgaaggacgaggacaagtctgagctgctggccaagaacctgagccatctgctgggcaactccgatgccaagcctgccatcaacggcatgagagagatgaccaccaagctggtcaccgtgctggaagaactgaccatgcggcaggacctgcggtttctgacactgctgtcttggaagggcatgatctacgacaagggcctgttccgcaactacagagcctggtgtccttgctgctgggaagagtggatgcaagagaacaagaacatctacgagcccctgctgtggtccttcaaggacgtggaattctgtctgatccacaagcagcggctggtggaagagtgtcctcactgtggctctagactgcccgtgatggccagattttctcctgccggcttctgcagccggtgttatagatggctgggccaagagatcaagggcgaagaggaaatcgagaagtaccaagtgaacatccagggcatcagcgagctgatcgctctgacacctcagctgggctacaagcccattcctatcgagctgacccggaaactgcagctgatcctgctggtgttcgagcaggccatcggcaaggatctgaaactgctgggagatctcggcggcatcatggaaagcctgagaatcgccagcaccaccaaccagagccagccttaccacctggtcaagctgatcttccccgtgtgcgagaaggccaagatcagcgtgtcccagctgttcgagagcgacttccaagagctgggcaagatcctgttcggcaatttcagcctggaactgaagctgtga

SEQ ID NO: 1111 - DNA, 2274 bp, Homo sapiens
  source 1..2274: mol_type = other DNA
atgtgttgtctggcccacatcaacgacatcttttgccagtgcgtgtcccctaagccttacaagcagggctacctgaagcagcagtacatcctgaacgaacaggtggaagccaacgtgcaagagatcatcgtgaactaccccggcatcaacctgaccaacctgctggaaaaggccaagaacgccaccatcgacgacatcaacaccctgatcgccctggaaaaagtgtacgtgaacctgagcgaggtggccctggtggaacaagagaaagtgcacctgttcagagacaaggccaccgccgaggcctacatcacagccacacacgattactgcgagcccgtgtccagcaacgtgtccatcgtggaactgaaagtgggcagcagcttcctgctggacggcaagagcctgaccatcgatcacatcggcgagagcaagatcatcctgagaggcgagcagggcatcatcagatggacctacgccgagttccagcagctgatcgagctgggcgagatcatcaatctgcagaccgagaaccacaccacactggacgaggaaggctggcagtacttcctggaagctagccccaaggctctggaaaccgccaactacagatacgccgccatcaagccctttctgggcaaagagctggacaacagccagaagtgcgacctgtccgagagaaccctgagagactggaaggccaagtaccggaaggcccagcagaaatacggctgcggcttcatcggactgatccctcagtacaagggcaaccccacacctcggtacagcgacgaggacctggaattcatcgacgaagtgatcgaggaacagtacgagacattcaagcagaagaacgtctggcagacctacgagctgctgcgggacaagtggcagaagtccggaagaatcagccctctgcctagccacaccttctactacgagagagtgaagaagcggaacagctaccagcagaccaagaagagaaccggcagcagagccgccaacaatctgcttggcccttggctgatcagacccaccacacctagacacggcgacagacccctggaaatcgtgcacatcgaccacactcagctggacatcgagtgcatctgcccttacagcggccagaacttgggcagaccttgggtcaccggaatgatcgacgcctacagcagacggatcctggctctgtacctgaccttcgacaaccccagctaccggtcctgcatgatggccattagaatctgcgtgcagagattcggcagattccccgagtggatcgtggtggacaacggcaaagagttcagcagcacctacttcgagacactgctggccagattcgaggccagcaagaagcacagacccaaggattgccccaaattcagctccatcatcgagcgttggttcggcagccagaacaccgagttcatcaacaacctgcggggcaacacccagatcatgaagcacgtgcggctggtcaagaaggctaacaaccccaagaacctggccgtgtggaacctggaagaactgtacgactacctggccttcggctacgcctacggcgtgtacgataaggccgaacatcctgctctggaaggcatgagccctcacaaggcctttgaactgggcctcgccaagacaggccacagacctcaccagtacattaagtacgacgagcagttcaagatcctgacactgcccaccaacaacaagggcacagccaaagtgatccccggccagggaatcagagtgaattaccagaactactggaccgacgagttctacagcgtggaaaaccagagcatccccgtcagatacgaccctctggattgcggcgtgacctatgcctacgtgaacaaccactgggtcaagtgcctgagcaactactacatgaagtttcagggccacagcgagaaggccgtggccattgccaccaccatctgcagaagaaagcggcagatctacaaccagagccagtacgtgggctccaaagaaatcgtggacctgctgaacaacgccgaggaacacgaggaactgatcctgcagattcggagggaccagagcgccaagctggtgttcaatctgatcgagggcacactgagcagcgccgtgctcctgaatgtgtccaataccgagcagcacagcagccacgactcccagaagatcgaagagaatctggacctcatcgacctgaaagaggaaatcctgcagcctagcatccccaagaagttcaaccccgacgatatccaggccttcgccgaagaggaactgtggtga

SEQ ID NO: 1112 - DNA, 1119 bp, Homo sapiens
  source 1..1119: mol_type = other DNA
atggtggccaacagacggttccctcaagaactgctgcaggccaccaccgacaacaagctgaagtactttaaggacatcatcgtgccccaccggaacatcaagctggtgctggatcagctgctgaagaacgccatcgagcccgatgatgccctggtgtacctggtgtttggagtgacaggcgtgggcaagagcagactgaaggccgagttcgagaagagactgctgaagcacttcgccgacgagatcatcagcaaccctggcagcctggttgttggcggaatcgaagtggatggcgccgaggccggcaagttcaactacagcaactactacatccaggtgctcgagagcctgaaagaggtgctgatcgactacaaagaaaactacggcgtggacctcgaggacgacaacagcgacaatctgatcggcgaccacgagggcagaaacagcaaggccctgcggagaacaatccagaaggtgttcctgcaccggcagctgaaggcttacacactggatgaagcccagcacctgttcgacgttgcaggcggcagacagatcaacgtgcagatgaactggctgaagtccctggccaacaagacccagaccgtgcacatcctgttcggcacctacgaactgctgaaatgccaagaagtgaacggccaagtcggcaggcggagcgaggattactacctgcctccttactatctgaccaagcctgaggaccagcaagagttcatcaaagtgatcaagaccctccagcagtacctgcctgtggaagtggaaccccagctggatgagcactgggagtacttcatggaatactccatcggctgcgtgggcatcctgaagtcctggtggtatcgggccctgaagaatgccctggatgagagggccaagaccgtgcggatgaaggacttcaaggccagagaactgagcgccggcagaagaaagaccatccagaaagagctggaagccggcgagtccagactggccttcctgtacaagaacgaggaaaagatcgagaagcccgagagcatcaacagccagtctctgaagaaaggccggaaagtgggcgagagaaaagtcggccgagatcttgtgggagtgaatcaagagggctga

SEQ ID NO: 1113 - DNA, 639 bp, Homo sapiens
  source 1..639: mol_type = other DNA
atgacagcccctctgatcctgtacgtggacgtgcccttcgccaccttcagagagtctcacgccagagagatgggcaagacataccccgttcctccaccagccacagtgtacggcatgctgctgtctctcgtgggcgagacagacgtgtacagacactgcggagtggaactggccattgccatgctgagcagccccaagaagtcccggatcctgcggcagatgcggagattcaagaacgccgacttcagcaaccccgagaacgtgatcccctgctaccaagaggtgctgagcaacctgaagtgcctgatctggatcagaagcgacggcgagaagatcaagcccagcctgagagagagaatccagctggccttcgatcaccccgaactcgtcagaagattcggctgcctgtttctgggcgagagcgaccagctgatcaagaccatcaagctggtgtcccaggactacctggaaggcgttagacagtgggccatcaaggacaaccggggcagactgacactgccctattgggttgaccacgtgggcagcagaaatacccggttcctgagataccggatcgaggaaatgcctagcagccctcctcctgacctggcctggacaatgattcagagccccatctga

SEQ ID NO: 1114 - DNA, 663 bp, Homo sapiens
  source 1..663: mol_type = other DNA
atgatcgccaccgccatcaacagcgagtactacctggacctgaccttcaagctgagaggcgcccctattcctctggacaatggctacgccgtgtacagcgccctgagcagaatttgcccaagcctgcacgagctgaagtccatcggcattcaccccatcacaggcatccccaccagaaacaacctgctggaactgacagcccagagccggctgaagatcagaatcaaccaccagcagatccctctgatctacccctacctggccggacaggcctttcacatcggccagaatagctaccagctggacatccccgactacaagcccctgatcagcagcgagagcgtgtactccagactggtcatcatcaagggcttccaggacagcaacaacttcatcgaggccgtgcagcggcagctggataacatcggaatccagggcaagatcgagctgctgaccagacaggatggcacccctcagaagagacagctgaccatcaacaaagaggaaaagaagttcgagattcgcggcttcggcgtgaagatctccgagctgaaccctgaggacagcctgacactgcaagagcaaggcatcggcggcaagcggaagatgatgtgcggcatctttgtgcccgccaccagatccaaagaagaggaagaaacctga

SEQ ID NO: 1115 - DNA, 969 bp, Homo sapiens
  source 1..969: mol_type = other DNA
atgatgacccagaagaagaacgacaacaacatccccaactactacctgtacggcaccgtgctgaccagatacggactggccagcctgaaccacgacatgcggagaggcaacaagaccacactgcagaaaggctactggaacggcaagatccacagcttcgtgggcagcagcgccattagatgggccctgagattctacctgcagcagcagggctacctggtcaacagagtgtgggacgaagatgagcacatcaacagactgaccagcgaggacttcgaccccgaggaattctacgacgacgacatcttcggcttcgccctgctggaaagcgccgagacagaggaagagatcagcaccaccaagcggaagaagaagcagaccaaggccagcacactgaaccagagaacaggcgccctgggcatgaacatggccgtgtctctgacaccttacgatggcgccgtgaagctgggagccaagagcggcagagataaggacagcaccagcctgcacttcaccgagtaccacgccaccagataccagtactacttcggcatcgacgccacacacctgagagacttcagccggatcctgcctctgatcgacggcatcatgaacctgcctaaagtcggcggcagcagcaatatcttcaactaccctttctgccccgactccttcgtgttccagtggaccaacaatctgcccagctacatcagctactgcttcgagtactgcgagcccaagagcaaagaggcccggttcacccaagagttcatcgacgaggtggaatgcggccagatcgaccctagcacactgtggatcggcggcaccatcgtgaaagagctgcaccagctggacaacttcgacaacagccccttcaagcaggcccacatctaccggaacagaaacgagctggccgaggctctgaaggccgtgatcaagagagatctggtcctggaagagtccaagtga

SEQ ID NO: 1116 - DNA, 1536 bp, Homo sapiens
  source 1..1536: mol_type = other DNA
atggtggccacacagcccaagatcagcctgtctctgggagccgccgataccaccatcatccacagagtgggcatgaccggcctgtacatgaccctgaagcagctggaaaagcagtaccccagcagcagacagagaggcggccacatttcttggagcctgaccgccgacaccatcgagctgttttggcagggcagcgacttcgtggccatcagctggctgatcaacgagagctttcagctggacgacaccggcctgattcatctggccggcctggacaacaacgccatcgatctgacccagaagatccagatccacgagggaatgtgcgccgtgttcctgcggctgaacaagttctaccaggccggaaagctggtcaacaccgagctgaccttcgaggaaaagaaggtcgagtaccagtacaagagcctgacttggtacgcccaccagaccttcgccgagaagctgtgcgataccgacacacagcagctgcggcaggactacgtgcagatcacaagctggctgtacctcggcggaattgtgcggcatgccagaacacagaacaccaccaagctggaagagaagcccgagtacgctctggccctgctgtttgtgcctgtcgtgtgccactattgcctgctgcacatccccagcgaggacctgaaagagaagaaaacccacagatacctggtggtcatccccgagatcaaggacttcgaggatgccagccagagaagatggcggctgcagcagctcgagacaaagcagctgcatgtctccagcctgggagaagccggcctgctgtactacagcctggacgatattcagccccagggcgactactatcaggcctgccaagtgtggctgtacgagaagatgaacaaggacagccggcagcggaccctgatgagcatcgaggaaatcaagatcgacaagaacaccctgatcacctaccagcagatccaaaagtacttccccaccaactaccagaagattcagcccaagcagatcttcatcaaagtgaaccccatccgcagcctgattgccgacaatctggtcaagggcatccactggtggtccaacttttgggagaaactggtcatcgacgacagccagggctacctgttcaaccagctgttcttcaaccgcgagggcttcatcatcatggccgagaacagcgaagaggacaagcagtatctgatctttatcaaggtgttccagcaggccatgaagggcaacttcgccaagatgtacgccaaggctcaagagggcaaagaccctcctatcaagaaaaaggtggaacggctgcgggccgagctgaactactgttacgatgagctgagcttcaaagagtacctgagcgacttcctcgtcagaggcggactgaacaaatacttcaatcagcaccaagaggaaatcgtgctgctgatcaagaagatcccctggcaagagctgcggatttggtccctgctggccattgccagctacaagcccaagaacaagctgaccaagatgaacgacgactccgaggaagagtga

SEQ ID NO: 1117 - DNA, 990 bp, Homo sapiens
  source 1..990: mol_type = other DNA
atgagcatctacgaggaaatctggtcccctaagagcctggaaatccctcagcggagccggctgttctgtctggaacctgtggctgtgggcaccccttacacagagagcctgagcagctacctgcacagactggcccaggctcactgtctgaccagccagaaactggtcatgggcgagatcgcccctctgatcctgaaggacgaggacaagtctgagctgctggtcaagaacctgagccatctgctgggcaacagcgacgccaagcctgccatcaatggcatgagagagatgaccggcaagctggtcaccgtgctggaagaactgaccatgcggcgggacctgagatttctgacactgctgagctggaagggcatgatctacgacaagggcctgttccgcaactacagagcctggtgtccttgctgttggcaagagtggatgcaagagaacaagacaatctacgagcccctgctgtggtccttcaagaacgtggaattctgcctgatccacaagcagcggctggtggaagagtgccctagatgtggcagcagactgcccatgatcgccaagtttagccctgccggcttctgcagcagatgctatggatggctgggccaagagatcaagggcgaagccgagatcgagaagtacagagtgaacatccagggcatcagcgagctgatcgctctgacacctcagctgggctacaagcccattcctatcgagctgacccggaaactgcagctgatcctgctggtgttcgagcaggccatcggcaaggatgtgaagctgctgggagatctcggcggcgtgatggaaagcctgagaatcgccagcaccagaaaccagagccagccttaccacctggtcaagctgatcatccccgtgtgcgagaaggccaagatcagcgtgtcccagctgttcggcagcgactttcaagagctgggcaagaccctgtttggcaacttcagcctggaactgaagctgtga

SEQ ID NO: 1118 - DNA, 2763 bp, Homo sapiens
  source 1..2763: mol_type = other DNA
atgctgtacgacgtggactttcaggcctggtgcaacagcctgcctctgtctcagcagcagagggacctcgtgaaccagatcagaacaagccctcctgccagaaaagtgaaaggcggcggaagaaacgtgcacggcccttacgcctctagcaagatgggcagaaccatccagttcgagagccacaccgtggaactgcccgccatgacacagttctacgagtacgacgaccaggtgctggaatactgggaccagcctatcaagttcagcatcaagtgcagccctcagggcaagcaggccaccaccatcagccactatcctgatttcttcgtgatgcggaagaactgctgcggcttcgaggaatggaaaaccgagaagcggctggaaaagctgagcgaggaacagccctaccgctaccagaaaattgagaagcagtgggtcgacgtgatcgtgcaagagtacatcgagagcctgggctactactaccggctgagaagcgacagcgagatcgactgggtcaagtaccggaaccagaagtacctgcagccttacaagcagggctacctgaagcagcagtacatcctgaacgatcaggtggaagccaatgtgcaagagatcatcgtgaactaccccggcatcaacctgaccaacctgttcgagaaggccaagaacgccaccatcgacgacatcaacaccctgatcgccctggaaaaggtgtacgtgaacctgtccgaggtggccctggtggaacaagagaaagtgcacctgttcagagatcaggccaccgccgaggcctacatcacagccacacacgattactgcgagcccgtgtccagcaacgtgcccattgtggaactgaaagtgggcagcagcttcctgctggacggcaagagcctgaccatcgatcacatcggcgagagcaagatcatcttcagaggcgagcagggcatcatccggtggacctatgccgagttccagcagctgattgagctgggcgagatcagcaacctgcagaccgagaaccacaccacactggacgaggaaggctggcagtatttcctggaagctagccccaaggctctggaaaccgccaactacagatacgccgccatcaaacactttctgggcaaagaggccgacaacagccagaagtatgacctgagcgagcggaccctgagagattggagagccaagtacagaaaggcccagcagaagtacggctgcggattcatcggactgatccctcagtacaagggcaaccccacacctcggtacagcgacgaggacctggaattcatcgacaccgtgattgaggaacagtacgagacaagcaagcagaagaacgtctggcagacctacgagttcctgaaggacgagtggcagaaagtgggaagaatcagccccgtgcctagccacaccttctactacgagagagtgaagaagcggaacagctaccagcagaccaagaaacggatgggctccagagccgccaacaatctgcttggcccttggctgatccagcctacaacacccagacacggcgacagacccctggaaatcgtgcacatcgaccacactcagctggacgtggaatgcatctgcccctacagcggcaagaacctgggcagaccttgggtcaccggaatgatcgacgcctacagcagacggattctggccctgtacctgaccttcgacaaccccagctaccggtcctgcatgatggccattagaatctgcgtgcagagattcggcagattccccgagtggatcgtggtggacaacggcaaagagttcagcagcacctacttcgagacactgctggccagattcgaggccagcaagaagcacagacccaaggacttccccaagttctccagcatcatcgagcgttggttcggcagccagaacaccgagttcatcaacaacctgcggggcaatacccagatcatgaagcacgtgcggctggtcaagaaggctaacaaccctaagagcctggccgtgtggaacctcgaggaactgtatgactacctggccttcggctacgcctacggcgtgtacgataaggccgaacatcctgctctggaaggcatgagccctcagaaggcctttgaactgggcctcgccaagacaggccacagacctcaccagtacatcaaatacgacgagcagttcaagatcctgacactgcccaccaacaacaaaggcatggccaaagtgatccccggccagggaatcagagtgaattaccagaactactggaccgacgagttctacagcgtggaaaaccagtgcatccccgtcagatacgaccctctggattacggcgtgacctacgcctatgtgaacaaccactgggttaagtgcctgagcaactactacatgaagttccagggacactctgagaaggccgtggccattgccaccacaatctgcagacggaagcggcagatctacaaccagagccagtacgtgggctccaaagaaatcgtggacctgctgaacaacgccgaggaacacgaagaactgatcctgcagatccggcgggatcagagcgccaagctggtgttcaatctgatcgagggcaagctgagcagcgccgtgctgctcaataccctgaataccgagcagcactcctaccaggacagccaggccatcgagaagaatctggacctgatcgacctgaaagaagagagcctgcagccaagcctgcctaagaagttcaaccccgacgatatcaaggccttcgccgaagaggaactctggtga

SEQ ID NO: 1119 - DNA, 1119 bp, Homo sapiens
  source 1..1119: mol_type = other DNA
atggtcaccaaccggcggttccctcaagagtttctgcaggcccctaccgacaacaagctgaagtactttaaggacatcatcgtgccccaccggaacatcaagctggtgctggatcagctgctgaagaacgccatcgagcccgatgatgccctggtgtacctggtgtttggagtgacaggcgtgggcaagagcagactgaaggccgagttcgagaagagactgctgaagcacttcgccgacgagatcatcagcaaccctggcagcctggttgttggcggaatcgaagtggatggcgccgaggccggcaagttcaactacagcaactactacatccaggtgctcgagagcctgaaagaggtgctgatcgactacaaagaaaactacggcgtggacctcgaggacgacaacagcgacaatctgatcggcgaccacgagggcagaaacagcaaggccctgcggagaacaatccagaaggtgttcctgcaccggcagctgaaggcttacacactggatgaagcccagcacctgttcgacgttgcaggcggcagacagatcaacgtgcagatgaactggctgaagtccctggccaacaagacccagaccgtgcacatcctgttcggcacctacgaactgctgaaatgccaagaagtgaacggccaagtcggcaggcggagcgaggattactacctgcctccttactatctgaccaagcctgaggaccagcaagagttcatcaaagtgatcaagaccctgcagcagtacctgcctgtggaaaacgagccccagctggaagaacactgggagtactttatgaagtacagcatcggctgcgtgggcatcctgaagtcctggtggtatcgggccctgaagaatgcccttgatgagggcgccaagaccgtgcggatgaaggacttcaaggccagagaactgagcgccggcagaaggcggacaatccaagaggaactgaaagccggcgagagcaggctggccaacctgtacacaaacgagcagaaggacgagaaccccgagttcaccaacagccagcctgagaagaagggcagcaaagtcggcgagcggaaagtgggcagagatctcgtgggagtgaatcaagagggctga

SEQ ID NO: 1120 - DNA, 639 bp, Homo sapiens
  source 1..639: mol_type = other DNA
atgatcgcccctctgatcctgtacctggacgtgcccttcaccaccttcagagagtcctacgccagagagatgggcaagacataccccgtgcctccaccagccacagtgtatggcatgctgctgtctctcgtgggcgagacaaacgtgtacagacactgcggcgtggaactggccattgccatgctgagcagccccaagaagtcccagatcctgcggcagatgcggcggttcaagaaccccgatttctctcaccccgagaatctgatcccttgctaccaagagatcctgagcaacctgaagtgcctgatctgggtccgaagcgacgaggaaaagatccagcctagcctgagagagcggatccagctggcctttgatcaccctgaactcgtgcggagattcggctgcctgtttctgggcgagtctgaccagctgatcaagaccatcaagctggtgtccgaggactacctggaaggcgctagacagtgggccatcagagacaacagaggcagactgaccctgccttactgggtcgaccacgtgggcagcagaaatacccggttcctgcggtacagaatcgaggaaatgcctagcagccctcctcctgacctggcctggacaatgattcagagccccatctga

SEQ ID NO: 1121 - DNA, 606 bp, Homo sapiens
  source 1..606: mol_type = other DNA
atgaagccccaccggtacaagagaggccacctgacatacggcgccctgagcagaatttgccctccactgcacgagctgaacaacatcggcattcaccctatcgccggcattcccaccagaaacaacctgctggaactgacagcccagagccggctgaagatcagaatctaccaccagcagatccctctgatctacccctacctggccggacaggcctttcacatcggccagaacttctaccagctggacatccccgactaccagcctctgatcagcagcgagagcgtgtacagcagactggtggtcatcaagggcttccaggacagcaccagcttcatcgaggctgtgcagcggcagctggataacctgggaatccagggcaagatcgagctgctgaccagacaggatggcacccctcagagaaggcagctgaccatcaacaaagagggcaagcagttcaaagtgcgcggcttcggcgtgaagatctccgagctgaatcccgaggacagcctgacactgcaagagcaaggcatcggcggcaagcggaagatgatgtgcggcatctttgtgcccgccaccagatccaaagaggaagaggaaatctga

SEQ ID NO: 1122 - DNA, 972 bp, Homo sapiens
  source 1..972: mol_type = other DNA
atgatgagccagaagaagaacgacaacaacatccccaactactacctgtacggcaccgtgctgaccagatacggactggccagcctgaaccacgacatcagaagaggcaacaagaccatcctgcagaaaggctactggaacaacggcaagatctacagcttcgtgggcagcagcgccatcagatgggccctgagattctacctgcaaaagcagggctacctggtcaacagagtgtgggacgaagatgagcacatcaacagactgaccagcgaggacttcgaccccgagaagttctacgacgacgacatcttcggcttcgccctgctggaaagcgccgagacagaggaagataccagcaccaccaagcggaagaacaagcagaccaagaccagaacacccaaccagagaatgggcgccctgggcatgaatatggccgtgtctctgaccccttacgatggcgccgtgaagctgggagccaagtctggcagagagaaggacagcaccagcctgcacttcaccgagtaccacgccaccagataccagtactacttcggcatcgacgccacacacctgagagacttcagccggatcctgcctctgatcgacggcatcatgaacctgcctaaagtcggcggcagcagcaatatcttcaactaccctttctgccccgacagcctggtgttccagtggaccaatcacttcgccagctacatcagctactgcttcgagtactgcgaccccaagagcaaagaggccaagctgagccaagagttcatcgacgaggtggaatgcggccagatcgaccctagcaagctgtggatcggcggcaccatcgtgaaagagctgcagcagctggacaacttcgagagcagccctctgaagaaggcccacatctaccggaaccggaacgagatgatcgaggccctgaaaaccgtgatcaagcgcgacctgggcctcgaggaatccaagtaa

SEQ ID NO: 1123 - DNA, 1686 bp, Homo sapiens
  source 1..1686: mol_type = other DNA
atggtcaccacacagcccaacatcagcctgtctctgcacgccgccgataccaccatcatgcacagagtgggcatgaccggcctgtacatgaccctgaagcggctggaaaagcagtaccggctgtctcacgaaagaggcggccacatcagctggatcctgaccgccgacaccatcgagctgttttggcagggcagcgactttatcgccctgagctggctgatcaacgagagctttcagctggacgacaccggcctgatccacctcgttggcctggacaacgatgccatcgacctgagccagaaggtgcacatccacgagggaatctgcgccgtgttcctgcggcacaaccagttttatcaggctggcgagctggtcaacaccgagctgaaggtggaagagaacaaggtggaataccagtacaagagcctgacttggtacgcccaccagaccttcgccgagaagctgtgtcaggccgatacacagcagctgcggcacgactacatccagatcaccagctggctgtacctcggcggaattgtgcggcatgccagaacacagaacaccaccaagctggaagaaaagagcgagtacgccctggctctgctgttcgtgcctgtcgtgtgtcactactgcctgctgcacatccccagcgaggacctgaagcagagaaagccccacagatacctggtggtcatccccgagatcaaggacttcgaggatgccagccagcggagatggcagctgcagcagctcgaaacaaagcagctgcacgtgtccacactgggcgaagccggcctgctgtactacagcctggatgacattcagcccgagagcgactactaccaggcctgccaagtgtggctgtacgagaagatcaaccgggccagcctgcagagaaccctgatgagcatcgaggaaatcgagatcgacaagaacaccctgatcacctaccagcaggtccagaagcacttccagcctaactatcagaaggtgtccggcggctctggcaagcaggttgtgacatttggagtggccctgctgatccagatcggactgcacagactgggaaccctgctgctgtggcactaccaccagaagattaagcccaagcagatcttcatcaaagtgaaccccatccgcagcctgatcgccgataatctggtcaagggcatccactggtggtccaatttctgggagaagctcgtgatcgaggacagcaaagagtacctgttcaaccagctgttcagcaaccgcgagggcttcatcatcatggccgagaacagcgaagaggacaagcagtatctgatctttatcaaggtgttccagcaggccatgaagggcaacttcgccaagatgtacgccaaggccgaggaaggcaaggaccctcctatcaagaagaaggtcgagcggctgcgggccgaactgaactactgttacgacgagctgagcttcaaagagtatctgagcgacttcctcgtcagaggcggactgaacaagtacttcaacgagcaccaagaagagatcgtcctgctcatcaagaagtctccctggcaagagctgcggatctggtccctgctggccattgccagctacaagcccaagaacaagcccaccaacagcgacgacaacagcttccccaacaaccagaacctggaagaagtgaacgacgagagcgagaaagagtga

SEQ ID NO: 1124 - DNA, 990 bp, Homo sapiens
  source 1..990: mol_type = other DNA
atgaccatctacagcgagcactggtccctgaagcctctggaaatccctcagcggagccggctgtttagcctggaacctatggctgtgggcaccccttatgccgagagcctgtctagctacctgcacagactggcccaggctcactgtctgaccagccagaaaatcgtgatgggcgagatcgcccctctgatcctgaaggacgaggacaagagcgagctgctgagcaagaacctgagccatctgctgggcaacagcgacgccaagcctgccatcaatggcatgagagagatgaccgagaagctggtcaccgtgctggaagaactgaccatgcggcaggacctgcggtttctgacactgctgtcttggaagggcatgatctacgacaagggcctgttccgcaactacagagcctggtgtccttgctgctgggaagagtggcggcaagagaacaagacaatctacgagcccctgagctggtccttcaaggacgtggaactgtgcctgatccacaagcagcggctgatcgaggaatgcagccactgtggctctagactgcccgtgatggccagattttctcctgccggcttctgcagcagatgctatggctggctgggccaagagatcaagggcgaagaggacatcgagaagtaccgcgtgaacatccagggcatctccgagctgattgccctgacacctcagctgggctacaagactatccccatcgagctgacccggaaactgcagctgatcctgctggtgttcgagcaggccatcggcaaggatctgaagctgctgggcgatcttggcggcatcatggaaagcctgagaatcgccagccggaccaaccagagccagccttatcacctggtcaagctgatcatccccgtgtgcgagaaggccaagatcagcgtgttccagctgttcggcctggacttcaaagagctgggcaagatcctgttcggcaatttctccctggaactgaaactgtga

SEQ ID NO: 1125 - DNA, 2697 bp, Homo sapiens
  source 1..2697: mol_type = other DNA
atgaaggaacagttcgagcagtgggtcgcccggctgcagatttctgaagccggccagaaaatcatcgacaaagtgcggagcagcgagcccagcagaagagttggcggaggcagcaagaatgtgtccggcagatacccctccagaaagatgggcgtgaccatccagttcgagagccacagagtggaactgcccatcatctaccagtttgagcacgacaaggacgtgctcgagttctacgaccagcctcctcagatcaagctggactaccaggccagcaatggcagacgactgggagtgctgcacacccctgatttcttcgtgatgcggaccaatagcgccggctgggaagagtgcaagaccgagcaggatctgaagaagctggccgagaagtcccctaaccggtacttctacagcgaagaggacaaccagtggaattgccctcctggcgaggactacgccaatcagttcggcctgtactaccggatcagaagcgaccgcgagatcaactgggtgctgcagagaaacctgcagttccttgaggactactaccgcagcgagagcctggtggtggaagaggccattacacagtctctgctggctgtggtgtctagccagcctggaattacactggccgagctgctgaatcagagcaccggcgccaagagcgacgacatctacaccctgatcatccaagagcagatctacatcgacctgaacgccacacctctggctgagcctgagagatgcctgatcttcagggatgagcagaccgccagcgcctacagactgatggtggaacagcctagcgtgaacctgcaggccatctctcccgtggtcaacatcgtgacaggcaccctggtgtcctgggatggcaagggcctgaacatcatccacgtgggcgagacagaagtgatcctgggcgccgagaacaaccagctgatcgagctgaagaaagccgtgttcgagaacctcgtgcggcagggcaagatcacctcactgcagaccccagagaaaaccgccatcagcacagagagctggcagcggtttagacaggcctctccagaggatcaggccgaggctctggaacggtacaagatcatcgagccctacctgaacggacaccctcctgagaacgagacaatccccgccagaaccatcagacactggaaggccaagtacctgaccgccatccagaagtacggctgcggctatatcggcctgctgtctcacagaagcgccaagggcaacagacagagaaagctgcccgaagataccctggccagcatggaacggttcatcagcgaggattacgaaaccaccaagcagaaacggatctgggaagtgtacgccgctctcgtcagagtgtgtgaacagtccggcgtgatcgcccctagctacaaggccttcaccaaagaagtgaagcggcggaccggctacgagcagaccaagaagagacagggacacagagccgcctaccagtacgagagcttctactgggagctgaccaccaccacacctagacacggcgacagacctttcgagatcggccacatcgatcacaccgagctggacgtggaactcgtgtgtagcgacaccggcagaaacctgggtagaccttgggccacctttctggtggacgcctactctagaaggctgctggccgtgtacgtgaccttcgacagcccaagctaccggtcctgtctcatggtgctgcggatctgcgtgaagagacacggcagactgcctcagatcgtggtggtcgataatggcgccgagtttcacagcgtgtacttcgagacactgctggccaccttcgagtgcaccaagaagcaacggcctccagccaaggccagatttggaagcgtgtgcgagagactgttcggcaccagcaacacccagttcgtgcacaacctgctgggcaatacccagatcacccggaacgtgcggcaagtgaccaagtccgtgaatcccaagaacctggctgtgtggacactgggactgctgtacgagtacctgtgtgcctgggcctacgaggtgtacgataccgatgaacaccccgctctgtttcagagccccagggatgcttttgccgccggaattgccatcggcggctctagagtgcaccggatgatcccttacgacgagaacttccagatcctgacactgcccaccacctccgagggcaaagccaaggtgcaagttggcagaggcgtgaagatcaacagcatctactactggtccaacagcttcagggacccacagatcgagaacacctccgtgcagatcagatacgaccccttcaacatcggaatcgcctacgccttcgtcagaggccagtgggtgcagtgcatcagccagtactacgccgaactccagggcagaagcgagaaagagctgaaactggcctccatcgagctgcggaagagaagctctaatcacgcccagcagtctaaggtgtccgccaaaaacctggccgagttcctggctagcgtggaagcccaagaagccctgctggaacagcggagctatgacaccgaagccagagaagtgttcagagtgatcgaaggcggcaaggccgccacctctagaaacgagcagcctaagctgatccaggtgccattcggcaataccgatagccaggtggacgaggacgaggccctgattcctgagattctggtggtgtacgaggacttctga

SEQ ID NO: 1126 - DNA, 1152 bp, Homo sapiens
  source 1..1152: mol_type = other DNA
atgaccacactggacgcctttccactggaactgctgacccagcctgccacagagagactggcctacttcgagaacaagaccgtggctcaccccagactgcaagaagtgaacgagatcctgatgcggacaatcgccgaacctgccggcgctagcttcatctttgtgtacggccctagcggcatcggcaagacaaccctgagactgagagccgaggaaaagctgaccgaactggccctgcctaagctggaaagcgacagagcccacgtgccagtgatcggcattgaggctattgccccagagagccggtacttcaactggaaagagtactacacacgggccctgatcgccctggaagaacctctgatcgaccacaagttcgactacggcgtgcggggcatcagcagaaacaacttcggcaagatcaatgtcgagagcaaggtggtggcccctgctctgagaagggccctcgaaaatgccctgatccacagacaccccgacgtgttctttgtggacgaggcccagcactttggcaaggtggcctctggctacaagctgcaggatcagctggactgcctgaagtccctggccaacatgacaggcatcctgcactgtctgctgggcacctacgagctgctgaccttcagaaatctgagcggccagctgtctcggcggagcgtggacatccacttcagaagatactgcgccgactctcccgaggacgtgcaggcctttaaaagcgtgctgctgactttccagcagcacatgcctctggccgagacacccaatctggtggaccactgggagtacttctacgagagaaccctgggctgcgtgggcatcgtgaaggactggctgatgagagccctgaaggacgccctggatagagaggccacaaccatcacactgaaggacctgcagaaaagggccctgagcgtggcccagtgccagaagatctttaaggacatccaagagggcgaactgcagctgagcgaaactgaggcccatgtgcaggatctgagatctgcccttggcctgggagccaagcctatcgttctgcctgaggaaacccctaagaccaccagacctccaaagaaggtggccaagcggaagcccaagagggatcctattggagtgcagcaggacgtgtcctga

SEQ ID NO: 1127 - DNA, 636 bp, Homo sapiens
  source 1..636: mol_type = other DNA
atgagcagcattgccgtgtacatcgacgtgcccttcgccagctttagacagagccacagcagagagtacggcaagacataccccgtgcctccaccagccacagtgtatggcatgctgctgtctctcgtcggcgagtgggatgtgtatctgcactgtggcgtgcagctggccatggctatgatcagccagcctcagatcagcaaggtgctgcggagaatccggcggttcaaagtgaagaacttcagcgacgaccggaacacaaaccccgagtaccaagaggtgctgagcaacatcaagttcatcgtgtgggtcgccagcaagaacgagcaggctcagcctacactgagagagaggattgagcaggccctgatctaccccgagagcgtgaaaagagtgggctgcctgtatctgggcgagagcaacgacctggtcaacaagatcaagctgatctccaacgactactgcttcgaggaacggtggtggctgatgcaggatgaggacggcctgatcatcctgccttactgggttgaccacgtgggctccaagaacacccggtggctgagatacggcctgaagaaaatcagcgtggaattccctccagagagctgctggaccaccatccaggccatcagatga

SEQ ID NO: 1128 - DNA, 585 bp, Homo sapiens
  source 1..585: mol_type = other DNA
atggaagccatcagcattcaccctatcgccggcattccccagcctctgaatcagctgagactgaccaacagaagccggctgagaatcagactgcctatcgatcagatccctctggtgtaccctctggccggacagaccatcaccatcgattggggcatcgagagagtgtcccaccaggccaagtttcagctgggcatcccctatcctaccgctctgcagcctgccagcacactgtactctagactggtgctgatccaccgggccgagacacctgaagctgtgctggaagttgcccagcggcagctgaacagaaagggcatcaagggcaccatcgagctgcctaccagagccaatggcgaggtgcagtgtagactgctgaccatcaagaagaagcaccagctgttcagactgagaggcttcggcatgaaagtgaccaagctgagcgagaaggacagcatcaagctgcagcagtctggcatcggcggcaagcacaagatgatgtgcggagtgttcgtgcccacctggcgggaaaccacagagaaggacgagaacagcaacgtgctggtcatctacagcggccggtaa

SEQ ID NO: 1129 - DNA, 906 bp, Homo sapiens
  source 1..906: mol_type = other DNA
atgttctacctgttcggcaccgtgatcacccactatggacccgccagcctgaaccacgagaaggccagaggaaatgtgtcccctctgcagaaaacctactgggacggccacatccacagcctggtttctggcgacgccatcagatggggcctgagatacaccctgcagaaagagggctaccccatcaacagacggtggaacgaggacgagttcaccaacgacctggtcaacgagaacttcgaccccgtggaattcgtggacgacgatctgttcggctatatgtacgccgaggccgccaaagaggacatccaagaggaagaacctagcagcaccggcaaagagcggcggaatcagacaaagggcagcatcgtgcagagactgggagccctgggagtgaacaggggagtgtctctgatcccttacacaggcgccctgaccttcaatgccaagagcggcaagatcaaggaccggacagccctgcacttcctggaataccacaacaccagataccagtacaccttcgctctggaccccaaccacctgaaagtgaaagagcggatcctggccttcatcgacgccctgatgaacatcagaaaagtcggcggcaacaacaacgtgttctgctacaagttcacccctgagagcttcgtgctgtgctggacccagagagagacacccggcatcttctactgcttcgaggaaggcgatctgatccccaagatgaagtccgaggtgctcgaggacatcgaagtgggcgatatcaaggccagcgagctgtggatcggaggcagagtggccaagggcctgaagatcaagaacgcccacatcttccggggaaaagagcaggccatcgaggacctgaagaaagtgatcgtgaaggacctggaactgagctacccctactga

SEQ ID NO: 1130 - DNA, 1257 bp, Homo sapiens
  source 1..1257: mol_type = other DNA
atgaccggcctgaatcctcctagcatcgagctgatcaaccagatccatctgcacttctctatcggcgccaccttcctgcggcactgcaagttctgcaaatacggcaagcagaccgtgcaagagatcatcatcgagggcaagcagcggaagctgacctacaagcccatcaagtggtacgcccaccagaccttcgccaagcagctgtgtcaagctggacagctgctgaccgactacatcagcatcatcagctggctgtacctgggcgccacagtcagacatgccatgctggacaagtacaacaagatccaagagaagcccgagttcgccctggtgctgctgtttgtgcctgtcgtgtgccagtacttcatctttcacccctactacgagaaaaccgacaacaacaaccccgagaagtacctgatcgtgatccccgagatcctggacctggaagaggccgcctatcagagatggcagtctggcaacctggcctacaagaactaccacgtgtccagcctgggagaagccgctctgatcacatacagctggcacgaggtggaaacccagcggagctgcgaaagaacctgtcaggtcctgctgtacgagaagttcaacaaggacagccaccagcggtccctgatcgagacaagagacatcaccatcaacctgaatatcctgaatacctacttcctgatcaagcagttctttcaagagaaccagttcgacagctacggcaagaaccggtggatcaaagtgaacttcatccggggcatcattgccgacaacctggtcaaaggtgtcccctggtggagcgacttctggaagatcctgaatcaagaggacatcgacggcgagctggcccagcagctgatcgataacaaagagggcctgatcgccatgatcgagcaggacaaagagatggaagattacaagctgttcgtgcaggccttccacgaggccctgagaagaaactacgccaagatccagaagcggacccaagagggcgagagagccagattcgatagagagtacgagcggatccggggcgagctgaacagatgctacgatgagcacagcttcagcgactttctggccgacttcctggccagagccggctttctgagcaccctgtacgatgagtgggacagcgtgctgcccttcatcaccgaatctgtgccttggcagaaggcccggaatatcgccctgtttgccctggccacatacaagcccgtgtccaagaatcagctggaaggcgagtga

SEQ ID NO: 1131 - DNA, 1032 bp, Homo sapiens
  source 1..1032: mol_type = other DNA
atgagcaactacaacgagctggacgacggcctggaaatcgtgtccctgaagtcccctgagacacccaagcggagcagactgttcagcctggaacctgtcggcatcggcacaagccagacagagtctctgagcagctacgtgaacagactggccgaggctcactgcgtgaagtcccagaaactgatcatgctggaaattgcccctcagatcctgggcaaagactaccagtctcctctgcacagcaaggacgtgtccagcctgttcggcaacaccgatgccaagcctgctctgaacggcatgcgggacatgaagctgctgctggtgcaggccctggaaaagctgacccagagacaggacctgaagtacctgacctgcctgagctggaaagaagtgatcaacaagcggggcctgttccggcagtacagagcttggtgtcctcagtgctacgagcagtgcaagcaggacaaggtgtccctgtacgaccctctgctgtggtccttcaaggatgtgaagttctgtctgcaccaccagtgccagctggtggacgagtgtcctaagtgcggctctcatctgcccgtgatcgccaactttctgcctctgggccactgcttctactgcggagaatggctgggcgacaacaagaacaagaaccccaagtgcaacttcaagaacttccccgagagcctgctgatcatcaagaacatcggcgacctgatcgccgtgacacccagactgggatctcagcccacactggacgagttcatccagaagctccagctgatcctgttctgcttcgagaaagtgatcagccaggacctcaagcacatcaaggtgctgggcaagatcatcgagcacctgaagctgaacctgagccagcacggcgacaagcccctgaatctgatcaagatcattatccccgtgtgcagcaaggcccacatcagcgtgtccgagctgttcctggaagatctgaccggcctgtccaagatcctgtttgacaacttccagatcaactaccagctgccgatcctgtga

SEQ ID NO: 1132 - DNA, 2208 bp, Homo sapiens
  source 1..2208: mol_type = other DNA
atggtcaaggccaatcctggcatctacctgagcgagctgcagcagaagatcgagatcgccagcatcgacgacttccacgtgctgatcctgaccgacaagatctacgtggacctgttcgccattcctctgagctgccctgagcaggtccaggtgttcctgtctgccaccgaggcctttacacacagccagctgaccaccatcgtgcccagcaactgggaaaccttcaacagccctctgaacgtggccatcggcacccagatctcttgggatggacagccctggaccatcgtgaacctgggcaacaattacgtgggcctgcagggcgagaacaacaccttccagcatctgcccaacagcgtgttcagcaccctggtgcatcaagagaagatcgtgggactgagcagccccaacttcagctctctgaaccccaagatcgaggaaatcttcagctacaccagccaggccgacctgcaagaggcccacagaagataccagcagatcgaggccttcctgaagggcaccgccagcacacctaccaacagaacccagagaagatggctggcctcctacagaaaggccgagcagctgtacggcagaggcttcatcggactgatccctcagcaccggcacaagggcaatagcctgagcaagatggacaaggacgtgcaccagctgatggaaaagcacatccaagaggaatacgagacacacaagcagcccagcatccggcatgccttccaggcctttaaagagctgtgcgcccacacaggactgcggcctccaagcctggaaacctacagacggtccatccggaacagacccgtggtggaacaagtgaagaagcggcagggaagcagagccgcctaccaagaagaaaccttctacgagttcctggaccggaacacccctatccacggcgaaagaccctttgagatcgcccacattgatcacaccctggccgatgtgcagctgctgagcctgatcatgctgaacctcggcatggaaatgaacgagggcgagcaccaggccaatctgggcaaagcttgggtcaccctgctgatcgacgcctacagcagaaggatcctggccgcctacatgaccttcgatagccccagctaccggtccaacatgatggtgctgagaatctgcgtgcagagattcggcagactgccccagatcctggtggtggatggcggcagagatttccagagcggcaacttcgaaatgctgctggcctacagccacgtgaccaagaaagagcgggccaacaccagagatggcagcgtgatcgagagcttcttcggcgtggccgacagagagttctggcacaacctgaagggaaatacccagatcatgaagaaagtgcggcaagtcaccaagagcgtgaaccctaagtaccacgccgtgtggaccctggacaagctgtacagatacttctgcgagtactgctacgagatctacgacacctgtcctcatcctacactgcggatgacccctagagaggccttcgagattggactggctagaggcggcctgagaggccatctgctgatcccttacgaggaattcaagctgctgtctctgcccgctcctaccgacaacgacggcatgagaagaatcacccctaagggcatcaagatcaactacctgtactacggacaccccagcttcgagagagtgcggaataccagagtggccgtgaagtacgagcccttcgacgtgacaatcgcctacgcctacatcaaaggcgagtgggtgcagtgcagatccggctacattagagagctgcagggccgcagcgtgaaagagctgatcacagcctccgacgagctgaagaagctgaaccagctgcagaaccagcagttcagcgacatcaccggcaagaatctggcccagttcttcacccggatcgagagagaggaagccatcctgacacctagctggcgcgaggccaaaaaagctgtgcaggcacagcacctgagagatgaggaactgaaagaagtgctgaacgagatcgagggcaagcccagcaccaaagagacaagcaacgacagcagcgagatcgacctgttcaccttcgagaacagagagtatatcgccctgtccagctctatcagccctccatctcctatccagcagacccaggtggacgaggacgacgacaacgatgagttcgaggaactgttcgagcccctggaagagtggtga

SEQ ID NO: 1133 - DNA, 1200 bp, Homo sapiens
  source 1..1200: mol_type = other DNA
atggctctgcagggctttcctcctgaactgctgaatcagagccctcagaagcggctggacttcttcaagagccccgacatcaccttcatgcacaagatcctgcacaagacctacaaccagctgtaccggaaagtgtgcaagcctgccggcgctagcacaatcctgctgattggaccttctggcgtgggcaagagcaccctgatggacctgctgaagaagcggatcctggaagagtccctgcctcagatggaactggaacccgcctggattcccatcatctgcgtggaagctgatgcccctggcaagggcaccttccggtggaaaaagttctaccagcaagtgctgctggaagtggacgagcccggcatcaagtacaagatcgactacaacaagatcaattacgaggaagagggcatccgcagaggcaacaacggcagactgatcatcggagccagagccaccgaggacagcctgaagatctctatgaagcaggccctgaagtacaggcacccctacacactggccatcgacgagtttcagcacatcggcatcagggccaacgaggatctgctgaaggcccacatggactgcctgaagtccgtggtcaacggcacaaagatccctctgaccggcttcggcacatacgaactgctggaattcctggaactgagcccacagctgagcagacggacactgaagatccactttcaccggtacagatgggagaacgacgacgagtgcaaagaattcaagcgggtgctgtacaacctgatccacagaatgccctttccaaaccagcctaccatcaccaagcagatctgggagttctgcttcgagcggagcatcggcaatatcggcacactgatcgactggctgaccgacgcctatgatctggccctggccaatgatgccccaagcctgagcttcgactacctgaaagagacagccaagagcagactggactgcgagcagatgatcgaggaagccattgagggcgaagcccggctggaagagacagaggacagcaccaacagactgaaggtcctgctgggcatgaagtccgccagcaagcccagcaagagcaacgccaatagcacagaccccaacagcacagcccagaaaacaaagaaagacgtgaagaacaagcccttcaagcggaagcccgtgcgggatcaagttggcggacaggacgaaacctga

SEQ ID NO: 1134 - DNA, 639 bp, Homo sapiens
  source 1..639: mol_type = other DNA
atgatcacccctctgatcctgtacctggacgtgcccttcgtgaccttcagagagtctcacgccagagagatgggcaagacataccccgttcctccaccagccacagtgtacggcatgctgctgtctctcgtgggcgagacagacgtgtacagacactgcggagtggaactggccattgccatgctgagcaaccccagaaagagccggatcctgcggcagatgcggcggttcaagaacctgaacttcagcgagcccgagaacgtgaaccccgcctaccaagagatcctgtccaacctgaagtgcctgatctgggtccgaagcgagggcgagaagatccagcctagcctgagagagagactgcagctggccttcgacagacctgagctggtgcagagattcggctgcctgtttctgggcgagagcgaccagctgatcaagaccatcaagctggtgtccgaggactacctggaaggcatgagacagtgggtcatcaaggacaaccagtgccggctgaccctgccttattgggttgaccacgtgggcagcagaaatacccggttcctgagatacaagatcgaggaacggtccagcctgtctcctcctgacctggcctggaccatgatcagaagccccatctga

SEQ ID NO: 1135 - DNA, 663 bp, Homo sapiens
  source 1..663: mol_type = other DNA
atgaccgccgtgtccatcaacagcgaggaatacctggacctgagcttcaagctgaagggcgctcccattcctctggacaacggctaccctatctacgccgctgtgtccagaatctgccccagcctgcacaagctggacagcatcggcattcaccctatcgccggcattcctaccagcaacaacttcctggaactgacagcccagagccggctgaagatcagaatccaccaccagcagatccctctgatctacccctacctgaccggccagacatttcagctgggccagcacagctaccagctggacatccccgattacaagcccctgacaagcagcgagagcctgtacagcagactggtggtcatcaccggctatcaggaccccaccacctttatccaggccgtgcagcggaagctggataacctgggcatcagaggcaagatcgagctgctgaccagacaggatggcacccctcagagaaggcagctgaccatcaacaagcagggcaagcagttcaaagtgcgcggcttcggcgtgaagatctccgagctgtctcctgaggacagcctgacactgcaagagcaaggcatcggcggcaagcggaagatgatgtgcggcatctttgtgcccgccaccagatccaaagaggaagaggaaggctga

SEQ ID NO: 1136 - DNA, 510 bp, Homo sapiens
  source 1..510: mol_type = other DNA
atgaaccagaacaacaacgacgacaggatgcccaactactacctgtacggcaccgtgctgaccagatacggactggcctctctgaaccacggcatgagacagggcaacaagaccatcctgcagaaaggctactggaacggcaagatccacagcttcgtgtccagcagcagcatcagatgggccctgcggttctatctgcagaaacagggctacctggtcaacagagtgtgggacgagaacgagcacatcaacagactgaccagcgaggacttcgaccccgagcagttctacgacgacgacatcttcggcttcgccctgctggaaagcaccgaaaccgaagagggcaccgtgaccaccaagaccagaaagaagaaggccaagctgagcagccccaaccagagaatgggagccctgggcatgaacatggccgtgtctctgacaccctacgacggcacactgaagctgggagccaagagcggcagagagaaggatagcaccagcctgcactga

SEQ ID NO: 1137 - DNA, 1575 bp, Homo sapiens
  source 1..1575: mol_type = other DNA
atgatcgtggccacacagcccaagatcagcctgtctctgcacgccagcgacaccaccattatgcacagagccggcatcaccggcctgtacatgaccctgaagagactggaagctcagtaccccagcagccatcagagaggcgcccacatttcttggagcctgaccgccgataccatcgagctgttttgggagggcaccgactttgtggccctgagctggctgttcaaagagagctttcagctggacgataccggcctgattcacctggccggcctggataatgatgccgccgatctgagccagaagatccagatccacgagggaatgtgcgccgtgttcctgcggctgaacaagttctacaaggccggcaagcaagtgaaaaccgagctgaccgtggaaggcaagaaggtggaataccagtacaagagcctgacttggtacgcccaccagaccttcgccgacaagctgtgcgagacagatacccagcagctgaagcaggactacgtgcagatcacctcctggctgtacctcggaggaattgtgcggcatgcccgggctcagaacatgaccaagctggaagagaagcccgagtacgccctggctctgctgtttgtgcctgtgatctgtcagtactggctgctgcatctgcccagcgaggacctgaaagagagaaagccccacagatacctggtggtcatccccgagatcaaggacttcgaggatgccagccagagaagatggcggctgcagcagctggaaacaaagcagctgcacgtgtccagcatcggagaagccggcctgctgtactacagcctggacaacattcagcccgagggcgactactaccaggcctgtcaagtgtggctgtacgagaagatgaaccagagcagccaccagcggaccctgatgagcatcgaggaaatcgagatcaaccagaacaccctgatcacctaccagcgggtgcagcagtccttccagcctaactatgagaagattcagccccagaaaatcttcgtgaaagtgaaccccatccgcagcctgattgccgagaatctggtcaagggcatcccctggtggagcgacctgtgggagaagctggtcatcgaggacaccaagggctacctgttcaaccagctgctctacaacagaggcggcgtgatcatgatggccgagaacagcgaggaagatgagcagtacctgaccttcgtgaaggtgttccagcaggccatgaagggcaacttcgccaagatgtacgccaaggccgaggaaggcaaagagcctcctatcaagaaaaaggtggaacggctgcgggccgagctgaacagctgctacgataagctgtcctttcagcagtatctgagcgacttcctcgttagaggcggcctgaacaaatacttcaacgagaacaaagagtccatcctgctgctgatcaagaagtcccactgggaagaactgcggatctggtccctgctggccattgccagctacaagcccaaagagaaacccaacgacaccgagaactccagcagcaccaacaaccaggatctgaaagaagtgtccgacgagagcgagtga

SEQ ID NO: 1138 - DNA, 990 bp, Homo sapiens
  source 1..990: mol_type = other DNA
atgagcatctacagcgagctgtggtcccctaagcctctggaaatccctcagcggagccggctgttctgcctggaacctattgctgtgggcaccccttacgccgagagcctgagcagctacatcaacagactggcccaggctcactgcctgaccagccagaaactggtcatgggagagatcgcccctctgatcctgaaggacgaggatcagtctgagctgctgagcaagaacctgagccatctgctgggcaacagcgacgccaagcctgccatcaatggcatgagagagatgaccgagaagctggtcaccgtgctggaagaactgaccagacggcaggacctgcggtttctgacactgctgtcttggaagggcatgatccacgaccagggcctgttcagaaactacagagcctggtgtccctgctgctgggaagtgtggaagcaagagaagaaaaccgtgtacgagcccctgctgtggtctttcaaggacgtggaagtgtgcctgatccacaagcagcggctggtggaagtctgtcctcactgcggatctagcctgcctgtgatggccagaacaagccctgccggcttctgcagcagatgttatggctggctgggccaagagatcaagggcgaagaggaaatcgagaagtaccgcgtgaacatccagggcatctccgagctgatcgtgctgacccctcagctggaataccagcctattcctatcgagctgacccggaaactgcagctgatctccctggtgttcgagcaggccatcgagaaggacctgaagttcctgggcgaactcggcggcatcatcgagtctctgaagatcgccagcatccagaaccagaatcagccctaccacctggtcaagctgatcatccccgtgtgcgagaaagccaagatctctatcagccagctgttcctgctgaacttcaagaacttcgtcgagatcctgttcaagaatttcgccattgagctgaagctgtga

SEQ ID NO: 1139 - DNA, 2757 bp, Homo sapiens
  source 1..2757: mol_type = other DNA
atgctgagcgacaccgagtttcaggcttggtgcgacagactgcagctgagccagcagcagagagactgggtcaaccagatccggacatctcctccagtgcggaaagtgaagggcagctccagaaatgtgcacggcccttacgccagcaagaagatgggcagaaccatccagttcgagagccacaccgtggaactgcccgccatcatccagttttacgagaacgacgacagcgtgctggaatactgggaccagcctatcaagctgaccatcaagtgcagccctcagggcaagcaggccaccacaattgctcactaccccgatttcttcgtgatgaagaaaaaccgctgcggcttcgaggaatggaaaaccgagaagaagctggacaccctgagcaaagagcaggcctacagataccagaacctggaaggcaaatgggtcgacatcatcgtgcaagagtacatcaagagcctgggctactactacagcctgcggagcgacagcgagatcgattgggtcaagtaccggaaccagaagtacctgcagccttacaagcagggctacctggaccagcagtacatcctggacgaacaggtggaatttcacatcaaagagatcatcatcaacaaccccggcatcaacctgaccaacctgatcaagaaggcccagaacgccagcatcgacgacatcaacacactgatggccctggaaaaggtgtacgtggacctgtctgccgtggctctgatcgagcaggatagagtgcacctgttcagagatcaggccaccgccgaggcctacatcacagccacacacgattacagcgagcccgtgtctagcagcgtgcagatcgtggatctgaaagtgggcagcagcttcctgctggacggcaagagcgtgaccatcgatcacatcggcgagagcaagatcatcctgaagggcgagcagggcatcatcagatggacccacgccgaatttcagcagctggtggaactgggcgagatcagctacctgcagacaaaagagcagaccacactggacgaggaaggctggcagcagtacttcatcgaggctagccccaaggctctggaaatcgccaaccagagataccaggccatcaagcccctgctggatggcgagtcttacgacagcctggactgcaacagacccgagagaaccctgagagagtggaaggccaagtacagaaaggccaagcaagagcacggcgtgggcctcgttggactgatccctcagtacaagggcaaccccacacctcggtacagcgacgaggacctggaattcatcgacaaagtgatcgaggaacactacgagacattcaagcagaagaacgcctggcagacctacctgatcctgcgggacaagtgggaagagagcggactgacaagccccattcctagccacaccttctactacgagcggctgaagaagcggaacagctacaagcagaccaagcggcggatgggaagcagagccgccaattctcttctcggcccctggctgatcaagcccaccacacctagacatggcgacagacccctggaaattgtgcacatcgaccacacacagctggacgtgcagtgcgtgtgcccctactccaagaagaatctgggcagaccttgggtcaccggcatgatcgatgcctacagcagacggattctggccctgtacctgacctttgatcaccccagctaccggtcctgcatgatggccattagaatctgcgtgcagagattcggcagattccccgagtggatcgtggtggacaacggcaaagagttccagagcacctacttcgagacactgctggccagattcgaggcctctaagaagcacagacccaaggacgtgccaaagttcagcagcatcatcgagcgttggttcggcagccagaataccgagttcattaacaacctgcggggcaacacccagatcatgaagcacgtgcggctggtcaagaaagagaacaaccccaagaacctggccgtgtggaatctggaagaactgtacgactacctggccttcggctacgcctacggcgtgtacgatagaagcgaacacccagctctggaagggatgtctccacagcaggccttcgaaagcagactggccaagacaggccacagacctcaccagtacattaagtacgacgagcagttcaagatcctgacactgcccaccaacaacaagggcaccgccaaagtgattcccggcaaaggcgtgcggatcaactaccaggactattggagcgacgagttctacagcgtggaaaaccagagcgtgcccgtcagatacgaccctctggattacggaatcgcctacgcctatgtgaacaaccactgggttaagtgcctgtccaactactacatgaagttccagggctacagcgagaaggccgtggaaattgccagcaccgtgtgcaagagaaagcagcagcggtacaaccagagccagtacgtgggcgccaaagaaattgtggacctgctgaacaacgccgaagaacacgaggaaatcatgctgcagatccggcgggatcagagcgccaagctggtgtataacctgatcgagggcacactgagcagcgccgtgctgaatagcggcgacattaagcagcccagcgctcccaagaccaaagagattgaggaaaccatcctggatcgcgaggaagagatcctgcagccaagcctgtccagagagatcaacctggacaacatcaagcctttcgccgacggcgacctgtggtaa

SEQ ID NO: 1140 - DNA, 1122 bp, Homo sapiens
  source 1..1122: mol_type = other DNA
atggttatcgccaacaacaggccctttcctctggaaatcctgcacgagagcaccgacaacaagctcaagtacttcaaggacgtgatcgtgccccaccggaacatccggctgattctggaacagctgctgaagaacgccatcgagcccgatgatgccctggtgtacctggtgtttggagtgacaggcgtgggcaagagcagactgaaggccgagttcgagaagagactgctgaagcacttccaggacgagatcatcagcaaccccggcagcctgatcgttggcggcatcgaagtggattctgccgaaggcggcaagttcaactacagcgactactacatccaggtgctcgagagcctgaaagaggtgctgatcgactacaaagagaactacggcatcgacctcgagaacgacaacgaggacaacctgaagggcgaccacgagggcaagaatgccaaggctctgcggcggacaatgcagaaggtgttcctgcacagacagctgaaggcctacacactggatgaggcccagcacctgtttgacgtggcaggcggcagacagatcaacgtgcagatgaactggctgaagtccattgccaacaagacccagaccgtgcacatcctgttcggcacctacgaactgctgaaatgccagcaagtgaacggccaagtgggcagaagaagcgaggactactacctgcctccttactacctgaacaaggtcgaggaccagcaagagttcatcaaagtgatcaagaccctgcagcagtacctgcctgtggaaaacgcccctcagctggaagagaactgggagtacttcatggaatactccatcggctgcgtgggcatcctgaagtcctggtggtatcgggccctgaagaatgccctggatgaccaggccaagaccgtgcggatgaaggacttcaaggccagagaactgagcgccggcagacggaagaagatcaaagaggaactggaagccggcgagcggctgctggcctctctgtacaatgacggcaacctgaaaaagatcgagtccaccgccagcagcagccccaagaagggaagaagagtcggcgagcgcaaagtgggaagagatctcgtgggaatcaatcaagagggctga

SEQ ID NO: 1141 - DNA, 636 bp, Homo sapiens; identical to SEQ ID NO: 1127
  source 1..636: mol_type = other DNA

SEQ ID NO: 1142 - DNA, 585 bp, Homo sapiens; identical to SEQ ID NO: 1128
  source 1..585: mol_type = other DNA

SEQ ID NO: 1143 - DNA, 906 bp, Homo sapiens; identical to SEQ ID NO: 1129
  source 1..906: mol_type = other DNA

SEQ ID NO: 1144 - DNA, 1257 bp, Homo sapiens; identical to SEQ ID NO: 1130
  source 1..1257: mol_type = other DNA

SEQ ID NO: 1145 - DNA, 1032 bp, Homo sapiens; identical to SEQ ID NO: 1131
  source 1..1032: mol_type = other DNA

SEQ ID NO: 1146 - DNA, 2328 bp, Homo sapiens
  source 1..2328: mol_type = other DNA
atgctgccttctcacgagctgctggacaaccccatcttccagcggaacttcgtgtggctcgaggactacctgatcaagtgccccaacgtggaagcccaagtgaccgatgctgtgctggccatggtcaaggccaatcctggcatctacctgagcgagctgcagcagaagatcgagatcgccagcatcgacgacttccacgtgctgatcctgaccgacaagatctacgtggacctgttcgccattcctctgagctgccctgagcaggtccaggtgttcctgtctgccaccgaggcctttacacacagccagctgaccaccatcgtgcccagcaactgggaaaccttcaacagccctctgaacgtggccatcggcacccagatctcttgggatggacagccctggaccatcgtgaacctgggcaacaattacgtgggcctgcagggcgagaacaacaccttccagcatctgcccaacagcgtgttcagcaccctggtgcatcaagagaagatcgtgggactgagcagccccaacttcagctctctgaaccccaagatcgaggaaatcttcagctacaccagccaggccgacctgcaagaggcccacagaagataccagcagatcgaggccttcctgaagggcaccgccagcacacctaccaacagaacccagagaagatggctggcctcctacagaaaggccgagcagctgtacggcagaggcttcatcggactgatccctcagcaccggcacaagggcaatagcctgagcaagatggacaaggacgtgcaccagctgatggaaaagcacatccaagaggaatacgagacacacaagcagcccagcatccggcatgccttccaggcctttaaagagctgtgcgcccacacaggactgcggcctccaagcctggaaacctacagacggtccatccggaacagacccgtggtggaacaagtgaagaagcggcagggaagcagagccgcctaccaagaagaaaccttctacgagttcctggaccggaacacccctatccacggcgaaagaccctttgagatcgcccacattgatcacaccctggccgatgtgcagctgctgagcctgatcatgctgaacctcggcatggaaatgaacgagggcgagcaccaggccaatctgggcaaagcttgggtcaccctgctgatcgacgcctacagcagaaggatcctggccgcctacatgaccttcgatagccccagctaccggtccaacatgatggtgctgagaatctgcgtgcagagattcggcagactgccccagatcctggtggtggatggcggcagagatttccagagcggcaacttcgaaatgctgctggcctacagccacgtgaccaagaaagagcgggccaacaccagagatggcagcgtgatcgagagcttcttcggcgtggccgacagagagttctggcacaacctgaagggaaatacccagatcatgaagaaagtgcggcaagtcaccaagagcgtgaaccctaagtaccacgccgtgtggaccctggacaagctgtacagatacttctgcgagtactgctacgagatctacgacacctgtcctcatcctacactgcggatgacccctagagaggccttcgagattggactggctagaggcggcctgagaggccatctgctgatcccttacgaggaattcaagctgctgtctctgcccgctcctaccgacaacgacggcatgagaagaatcacccctaagggcatcaagatcaactacctgtactacggacaccccagcttcgagagagtgcggaataccagagtggccgtgaagtacgagcccttcgacgtgacaatcgcctacgcctacatcaaaggcgagtgggtgcagtgcagatccggctacattagagagctgcagggccgcagcgtgaaagagctgatcacagcctccgacgagctgaagaagctgaaccagctgcagaaccagcagttcagcgacatcaccggcaagaatctggcccagttcttcacccggatcgagagagaggaagccatcctgacacctagctggcgcgaagccaagaaagctgtgcaggcacagcacctgagagatgaggaactgaaagaagtgctgaacgagatcgagggcaagcccagcaccaaagagacaagcaacgacagcagcgagatcgacctgttcaccttcgagaacagagagtatatcgccctgtccagctctatcagccctccatctcctatccagcagacccaggtggacgaggacgacgacaacgatgagttcgaggaactgttcgagcccctggaagagtggtga

SEQ ID NO: 1147 - DNA, 1200 bp, Homo sapiens; identical to SEQ ID NO: 1133
  source 1..1200: mol_type = other DNA

SEQ ID NO: 1148 - DNA, 639 bp, Homo sapiens
  source 1..639: mol_type = other DNA
atgatcgcccctctgatcctgtacctggatgtgcccttcgccaccttcagagagtctcacgccagagagatgggcaagacataccccgttcctccaccagccacagtgtacggcatgctgctgtctctcgtgggcgagacaaacgtgtacagacactgcggcgtggaactggccattgccatgctgagcagccccaagaagtcccggatcctgcggcagatgcggagattcaagaacgccgacttctctcaccccgagaacgtgatcccttgctaccaagagatcctgagcaacctgaagtgcctgatctgggtccgaagcgacagcgagaagatccagcctagcctgagagagagaatccagctggccttcgatcaccccgaactcgtcagaagattcggctgcctgtttctggccgagagcgaccagctgatcaagaccatcaagctggtgtccgaggactaccctgagggcgttagacagtgggccatcagagacaaccggggcagactgacactgccctattgggttgaccacgtgggcagcagaaatacccggttcctgagataccggatcgaggaaatgaaccggctgagccctcctgacctggcctggacaatgattcagagccccttctga

SEQ ID NO: 1149 - DNA, 663 bp, Homo sapiens
  source 1..663: mol_type = other DNA
atgatcgccatcggcatcaacagcaaggactacctggacctgaccttcaagctgaagggcgctcccattcctctggacaacggctacctgacatacgccgctctgagcagaatctgccctcctctgcacgaactgaagtctatcggcattcaccctatcgccggcattcccaccagaaacaacctgctggaactgacagcccagagccggctgaaagtgcggatctaccaccagcagatccctctgatctacccctacctggccggacaggcctttcacatcggccagaacttctaccagctggacatccccgactacaagcccctgatcagcagcgagagcgtgtacagcagactggtcatcatcaagggcttccaggacagcaccaacttcatcgaggccgtgcagcggcagctggataacctgggaatccagggcaaagtggaactgctgaccagacaggatggcacccctcagagaaggcagctgaccatcaacaaagagggcaagcagttcaagattcgcggcttcggcgtgaagatcagcgagctgaaccctgaggacagcctgacactgcaagagcaaggcatcggcggcaagcggaagatgatgtgcggcatctttgtgcccgccaccagaagcaagagcgaggaagaaacctga

SEQ ID NO: 1150 - DNA, 969 bp, Homo sapiens
  source 1..969: mol_type = other DNA
atgagccagaagaaggacgagaacaacatccccaactactacctgtacggcaccgtgctgaccagatacggactggccagcctgaaccacgacatcagaagaggcaacaagaccatcctgcagaaaggctactggaacaacggcaagatccacagcttcgtgggcagcagcgccattagatgggccctgaggttctatctgcagaaacagggctacctggtcaacagagtgtgggacgaagatgagcacatcaacagactgaccagcgaggacttcgaccccgagcagttctacgacgacgacatcttcggcttcgccctgctggaaagcgccgagacagaggaagagatcagcaccaccaagcggaagaagaagcagaccaagaccagcacacccaaccagagaatgggcgccctgggcatgaatatggccgtgtctctgaccccttacgatggcgccgtgaagctgggagccaagtctggcagagagaaggacagcacaagcctgcacttcaccgagtaccacgccaccagataccagtactacttcggcatcgacgccacacacctgaaggactgcagcagaatcctgcctctgatcgacggcatcatgaacctgcctaaagtcggcggcagcagcaatatcttcaactaccctttctgccccgacagcctggtgttccagtggaccaatcacttcgccagctacatcagctactgcttcgagtactgcgaccccaagagcaaagaggccaagctgagccaagagttcatcgacgaggtggaatgcggccagatcgaccctagcaaactgtggatcggcggcaccatcgtgaaagagctgcagcagctggacaacttcgacaacagccccttcaacagagcccacatctaccggaaccggaacgagctgatcgccgctctgaaaaccgtgatcaagagagatctgggcctcgaggaatccaagtga

SEQ ID NO: 1151 - DNA, 1581 bp, Homo sapiens
  source 1..1581: mol_type = other DNA
atgatcgtgtccacacagcccaagatcagcctgtctctggatgccgccgacaccaccatcatgcacagagtgggaatgaccggcctgtacatgaccctgaagcggctggaaaagcagtaccccagctctcatcagagaggcgcctacatcagctggtttctgaccgccgataccatcgagctgttctgggagggcagcgactttatcgccctgtactggctgatcaacgagagcttcaagctggacgacaccggcctgattcatctggccggcctggacaacgatgccatcgatctgagccagaagatctacatccacgagggaatgtgcgccgtgttcctgcggctgaacaagttctataaggccggcgagatcatcaacaccgagctgaccttcgaagagaagcagatcgagtaccagtacaagagcctgacttggtacgcccaccagaccttcgccgagaagctgtgcgaagccgatacacagcagctgcggcacgactacatccagatcaccagctggctgtacctcggcggaattgtgcggcatgccagaacacagaacaccaccaagctggaagagaaacccgagtacgccctggctctgctgtttgtgcctgtcgtgtgccactactgcctgctgcacatccctagcgaggacctgaaagagcggaagccccacagatacctggtggtcatccccgagatcaaggacttcgaggatgccagccagagaagatggggactgcagcagctggaaacaaagcagttccacgtgtccagcctgggcgaagccggcctgctgtactatagcctggacgatatccagcctgaagtgggctactaccaggcctgccaagtgtggctgtacgaaaagaccaacaaggccagcagacagcccacactgatgagcatcgaggaaatcaagatcgacaagaacatcctcatcacctaccagcaggtccagaagtactttaagaccaactaccagatcattaagtacaagcagatcttcatcaaagtgaaccccattcggagcctgatcgccgacaatctggtcaagggaatccactggtggtccaacctgtgggagaagctggtcatcgaggacagcaaagagtacctgttcaaccagctgttcagcaaccgcgagggcctgatcattatggccgagaacagcgaagaggacaagcagtatctgatctttatcaaggtgttccagcaggccatgaagggcaacttcgccaagatctacgccaagaccgaggaaggcaaggaccctcctatcaagaaaaaggtggaacggctgcgggccgagctgaactactgttacgatgagctgagcttcaaagaatacctgagcgacttcctcgtcagaggcggcctgaacaaatacttcaacgagcaccaagaggaaatcgccctgctgatcaagaagtccccttggcaagagatcagaatctggtccctgctggccattgccagctacaagcccaaggacaagcccaccaaccgggacgacaatagcctgagcaacaaccagaaactcgaggaagtgaactacgagtccgaagagggctga

SEQ ID NO: 1152 - DNA, 990 bp, Homo sapiens
  source 1..990: mol_type = other DNA
atgaacatctacgaggaactgtggtcccctaagcctctggaaatccctcagcggagccggctgttctgtctggaacctgttggcatgggcacccctcacacagagagcctgagcagctacctgaacagactggcccaagagcactgcctgacagcccagaaactgatcatggccgagatcgccctgctgatcctggaaaacgaggacaagagcaagctgctgcagaaaagcgtgtcctacctgctgggcaacagcgacgccaagcctgccatcaatggcatgagagagatgaccggcaagctggtcaccgtgctggaagaactgaccatgcggcaggacctgcggtttctgacactgctgtcttggaagggcatgatctacgacaagggcctgttccgcaactacagagcctggtgtccttgctgctgggaagagtggcggcaagagaacaagacaatctacgagcccctgctgtggtccttcaaggacgtggaattctgcctgatccacaagcagcggctgagagaggaatgtccccactgcggatctagactgcccgtgatggctagactgtctcctgccggcttctgctccagatgttatggctggctgggccacaagatcaagggcgaagaggaaatcgagaagtaccgcgtgaacatccagggcatcagcgagctgatcgctctgacacctcagctgggctacaagcccattcctatcgagctgacccggaaactgcagctgattctgctggtgttcgagcaggccatcggcaaggatctgaagctgctgggcgatcttggcggcatcatcgagtctctgagaatcgccagcaccaccaaccagagccagccttaccacctggtcaagctgatcatccccgtgtgcgagaaggccaagatcagcgtgtcccagctgttcggcagccacttccaagagctgggcaaagtgctgtttggcaacttcagcctggaactgaagctgtga

SEQ ID NO: 1153 - DNA, 2766 bp, Homo sapiens
  source 1..2766: mol_type = other DNA
atgctgtacgacgtggaatttcaggcctggtgcaacaacctgcagctgagccagcagcagagggacctcgtgaaccagatcagaacaagccctcctgccagaaaggtgcaaggcggcggaagaaatgtgcacggcccttacgccagctccaagatgggcagaaccatccagttcgagagccacaccgtggaactgcccgccatcacacagttctacgagtacgacgaccaggtgctggaatactgggaccagcctatcaagttcagcatcaagtgcagccctcagggcaagcaggccaccacaatcggccactatcctgatttcttcgtgatgcggaaggactgctgcggcttcgaggaatggaaaaccgagaagcggctggaaaagctgagcgaggaacagccctaccgctaccagaaaatcgagcggcagtgggtcgacgtgatcgtgcaagagtacatcgagaacctgggctactactaccggctgcggagcgacaacgagatcgactgggtcaagtaccggaaccagaagtacctgcagccttacaagcagggctacctgaagcagcagtacatcctgaacgatcaggtggaagccaatgtgcaagagatcatcgtgaattaccccggcatcaacctgatcaccgtgctggaaaaagccaagaacgccaccatcgacgacatcaacaccctgatcgccctggaaaaggtgtacgtgaacctgtccgaggtggccctggtggaacaagagaaagtgcacctgttcagagatcaggccaccgccgaggcctacatcacagccacacacgattactgcgagcccgtgtccagcaacgtgtccatcgtggatctgaaggccggcagcagctttctgctggatggcaagagcctgaccatcgatcacatcggcgagagcaagatcatcttcagaggcgagcagggcatcgtgcggtggacatatgccgagttcgagcagctgatcgagctgggcgagatcagctctctgcagaccgagaaccacaccacactgggcgaagaaggctggcagtatttcctggaagctagccccaaggctctggaaaccgccaactctagatacgccgccatcaagccctacctggaaggcgagccctacaacagcaagaagtgcgacctgagcgagcggaccctgagagattggagagccaagtacagaaaggcccagcagaagtatggctgcggattcatcggactgatccctcagtacaagggcaaccccacacctcggtacagcgacgaggacctggaattcatcgaccaagtgatcaaagagcagtacgagacattcaagctgaagaacgtgtggcagacctacgaggtgctgcgggacaagtggcaagagagcggcagaatcagccccattccttctcacaccctgtactacgagagagtgaagaagcggaacagctaccagcagaccaagaaacggatgggcttcagagccgccaacaatctgcttggcccctggctgatccagcctaccacacctagacacggcgacagacccttcgagatcgtgcacatcgaccacaccaagctggatgtggaatgcatctgcccctacagcggcaagaatctgggcagaccttgggtcaccggcatgatcgatgcctacagcagacggattctggccctgtacctgaccttcgacaaccccagctaccggtcctgcatgatggccattagaatctgcgtgcagagattcggcagattccccgagtgcatcgtggtggacaacggcaaagagttcagcagcacctacttcgagacactgctggccagattcgaggcctccaagaagcacagacccaaggactaccccaagttctccagcatcatcgagcgttggttcggcagccagaacaccgagttcattaacaacctgagaggcaacacccagatcatgaagcacgtccgcttcgtgaagaaggcaaacaaccccaagaacctggccgtgtggaacctggaagaactgtacaactacctggccttcggctacgcctacggcgtgtacgataaggccgaacatcctgctctggaaggcatgagcccacacaaggcctttgaactgggcctcgccacaacaggccacagacctcaccagtacatcaaatacgacgagcagttcaagatcctgacactgcccaccaacaacaaaggcatggccaaagtgatccccggccagggcatcagagtgaactaccagaactactgggccgacgagttctacagcgtggaaaaccagagcatccccgtcagatacgaccctctggattacggcgtgacctacgcctatgtgaacaaccactgggttaagtgcctgagcaactactacatgaagttccagggacacagcgagaaggccgtggccattgccaccaccatctgcagacggaagcggcagatctacaaccagagccagtacgtgggcagcaaagaaatcgtggacctgctgaacaacgccgaggaaaacgaggaactgatcctgcagatccggcgggatcagagcgccaagctggtgtttaatctgatcgagggcaacctgtccagcgccgtgctgctcaacatcagcaataccgaacagcacctgagccaggactcccagaccatcgaggaagagaatctggatctcatcgacctgaaagaggacaatctgcagcccaacctgcctaagaagttcaaccccgacgatatccgggccttcgccgaagaggaactgtggtaa

SEQ ID NO: 1154 - DNA, 1119 bp, Homo sapiens
  source 1..1119: mol_type = other DNA
atggtcaccaaccggcggttccctcaagagattctgcaggcccctaccgacaacaagctgaagtactttaaggacgtgatcgtgccccaccggaacatcaagctggtgctggaacagctgctgaagaacgccatcgagcccgatgatgccctggtgtacctggtgtttggagtgacaggcgtgggcaagagcagactgaaggccgagttcgagaagagactgctgaagcacttcgccgacgagatcatcagcaaccctggcagcctggttgttggcggaatcgaagtggatggcgccgaaggcggcaagttcaactacagcaactactacatccaggtgctcgagagcctgaaagaggtgctgatcgactacaaagaaaactacggcgtggacctcgagaactacaacagcgacaacctgatcggcgaccacgagggcagaaatgccaaggctctgcggcggacaatgcagaaggtgttcctgtaccggcagctgaaggcttacaccctggatgaagcccagcacctgttcgatgttgctggcggcagacagatcaacgtgcagatgaactggctgaagtccctggccaacaagacccagacagtgcacgtgctgttcggcacctacgaactgctgaaatgtcaagaagtgaacggccaagtcggcaggcggagcgaggattactacctgtctccttactatctgaccaagagcgaggaccagcaagagttcatcaaagtgatcaagaccctgcagcagtacctgaccgtggaaaacgagccccagctggaagaacactgggagtacttcatggaatactccatcggctgcgtgggcatcctgaagtcctggtggtatcgggccctgaagaatgcccttgatgagggcgccaagaccgtgcggatgaaggacttcaaggccagagaactgagcgccggcagaagaaagaccatccagaaagagctgaaagaaggcgaggaccggctggccttcctgtacaagaacgaggaaaaggtggaaaagtccgagagcatcaacagccaggccgtgaagaaaggccggaaagtgggcgagagaaaagtcggccgagatcttgtgggagtgaatcaagagggctga

SEQ ID NO: 1155 - DNA, 627 bp, Homo sapiens
  source 1..627: mol_type = other DNA
atgatcgccctgagagtggacgtgccaatcgccagctttcccaccagcagaagcagagagtaccgcgagacataccccgtgcctccacctagcacagtgtacggcatgctgctgtctctcgtgggcgagacagaccggtataagcactgcggcgtgaagatcgctctggccctgctttctgagcccgccaagagcatcaccctgagaaagaccagacggttcaagagccagaagatcgaccacaaagagaacacccggcctgacttccaagagatcctgaccggcatcgagttcatcgtgtggatcgacaccggcgacgatctggctcagcctgacctgtgcgatagaatcaccggcgcctttgccaatcctggcagcgtgcagagattcggcctgctgtgtctgggcgagtccagagatctggtcaacagcatcgatctgctggccaccaccgacttcgaacagcctctgcagtacctgatccaggacgactacggctacctgagcctgccttactgggttgacagagtgggcagcagcaagacccggtggctgaactattctctggaagccctggaagtgcagcagcctcctcatagcgcctggaccaaaattcaggccccttga

SEQ ID NO: 1156 - DNA, 651 bp, Homo sapiens; identical to SEQ ID NO: 1085
  source 1..651: mol_type = other DNA

SEQ ID NO: 1157 - DNA, 1011 bp, Homo sapiens; identical to SEQ ID NO: 1086
  source 1..1011: mol_type = other DNA

SEQ ID NO: 1158 - DNA, 1698 bp, Homo sapiens; identical to SEQ ID NO: 1087
  source 1..1698: mol_type = other DNA

SEQ ID NO: 1159 - DNA, 1023 bp, Homo sapiens; identical to SEQ ID NO: 1088
  source 1..1023: mol_type = other DNA

SEQ ID NO: 1160 - DNA, 2736 bp, Homo sapiens; identical to SEQ ID NO: 1089
  source 1..2736: mol_type = other DNA

SEQ ID NO: 1161 - DNA, 1191 bp, Homo sapiens; identical to SEQ ID NO: 1090
  source 1..1191: mol_type = other DNA

SEQ ID NO: 1162 - DNA, 639 bp, Homo sapiens; identical to SEQ ID NO: 1070
  source 1..639: mol_type = other DNA

SEQ ID NO: 1163 - DNA, 666 bp, Homo sapiens; identical to SEQ ID NO: 1071
  source 1..666: mol_type = other DNA

SEQ ID NO: 1164 - DNA, 972 bp, Homo sapiens; identical to SEQ ID NO: 1072
  source 1..972: mol_type = other DNA

SEQ ID NO: 1165 - DNA, 1548 bp, Homo sapiens; identical to SEQ ID NO: 1073
  source 1..1548: mol_type = other DNA

SEQ ID NO: 1166 - DNA, 990 bp, Homo sapiens; identical to SEQ ID NO: 1074
  source 1..990: mol_type = other DNA

SEQ ID NO: 1167 - DNA, 2769 bp, Homo sapiens; identical to SEQ ID NO: 1075
  source 1..2769: mol_type = other DNA

SEQ ID NO: 1168 - DNA, 1116 bp, Homo sapiens; identical to SEQ ID NO: 1076
  source 1..1116: mol_type = other DNA

SEQ ID NO: 1169 - DNA, 639 bp, Homo sapiens; identical to SEQ ID NO: 1077
  source 1..639: mol_type = other DNA

SEQ ID NO: 1170 - DNA, 663 bp, Homo sapiens; identical to SEQ ID NO: 1078
  source 1..663: mol_type = other DNA

SEQ ID NO: 1171 - DNA, 969 bp, Homo sapiens
  source 1..969: mol_type = other DNA
atgatgagccagaagaagaacgacaacaacatccccaactactacctgtacggcaccgtgctgaccagatacggactggccagcctgaaccacgacatgcggagaggcaacaagaccacactgcagaaaggctactggaacggcaagatccacagcttcgtgggcgccaacgccattagatgggccctgaggttctatctgcagaaacagggctacctggtcaacagagtgtgggacgaagatgagcacatcaacagactgaccagcgaggacttcgaccccgaggaattctacgacgacgacatcttcggcttcgccctgctggaaagcgccgagacagaggaagagacaagcaccaccaagaagaaaaagaagcagaaaaccgtcagcagccccaaccagagaattggcgccctggccatgaacatggccgtgtctctgacaccttacgatggcgccgtgaagctgggagccaagagcggcagagataaggacagcaccagcctgcacttcaccgagtaccacgccaccagataccagtactacttcggcatcaaccccacacacctgaaagagatgagccggatcctgcctctgatcgacggcatcatggacatgcctaaagtcggcggcagcagcaatatcttcaactacagcttctgccccgacagcctggtgttccagtggaccaatcacttcgccagctacatcagctactgcttcgagtactgcgaccccaagaccaaagaggccaagctggcccaagagttcatcgacgaggtggaatgcggccagatcgaccctagcacactgtggatcggcggcaccatcgtgaaagagctgaagcagctggacaacttcgacaacagccccttcaacagagcccacatctaccggaaccggaacgagctggtggaagccctgaaggccgtgatcaagagagatctgggcctgcaagagtccaagtga

SEQ ID NO: 1172 - DNA, 1536 bp, Homo sapiens
  source 1..1536: mol_type = other DNA
atggtggccacacagcccaagatcagcctgtctctggatgccgccgacaccaccattatgcacagagccggaatgaccggcctgtacatgaccctgaagcggctggaaaagcagtacaccagcagcagacagagaggcggccacatcagctggtttctgaccgccgataccatcaagctgttctgggagggcagcgactttgtggccctgagctggctgatcaaagagagctttcagctggacgacaccggcctgattcacctgacagccctgtctaacgccgccatcgacctgagacagaagatccacatccacgagggaatctgcgccgtgttcctgcggcacaaccagttttaccaggccggcaagatcgtgaacgccgagctgacagtggaagagaagaaggtggaataccggtacaagagcctgacttggtacgcccaccagaccttcgccgagaagctgtgcgaagccgatacacagcagctgcgcgaggactacgtgcagatgacaagctggctgtacctcggcggaattgtgcggcatgccagaacacagaacaccaccaagctggaagaaaagcccgagtacgccctggctctgctgtttgtgcctgtcgtgtgccactactgcctgctgcacatccctagcgaggacctgaaagagaaaaagccccacagatacggcgtggtcatccccgagatcaacgacttcgaggatgccagccagagaagatggcggctgcagcagctggaaacaaagcagctgaacgtgtccagcctgggcgaagccggcctgctgtactatagcctggacgatatccagcctgaaggcggctactaccaggcctgtcaagtgtggctgtacgagaagatgaacaaggacagccggcagcggaccctgatgagcatcgaagagatcgaggtggacaagaacaccctgatcacctaccagcaggtccagaagtacttttgaactaattatcagcaaattaaacctaagcaaatttttattaaagtgaatccgattcgctccataattgctgataatttagtaaaaggaatccattggtggtctgatttttgggaaaaattggtgatagaggattcaaacgaatatttatttaaccagttatttttcaatcgagaaggattcataataatggcagagaatagtgaagaagacaagcattatcttattttccttaaggtgtttcagcaagctatgaagggtaactttgctaaaatgtatgccaaggcagaggcagggaaagaccctccaattaagaagaaagttgaacgattaagagcagagctaaactattgttatgatgaattgtcgtttaaagaatatttgtctgactttttagtaagagggggattaaataagtatttcaatcagcatcaagaagagatagcactactaattaaaaaaataccttggcaagaattaagaatttggtcattgttagcgatcgccagttataaacctaaagataaacctatcgaaatgaatgatgagtcagaagaagaatga

SEQ ID NO: 1173 - DNA, 990 bp, Homo sapiens
  source 1..990: mol_type = other DNA
atgaccatctacctcgagcactggtctatcatccctctggaaatccctcagcggagccggctgtttagcctggaacctgtggctgtgggcacaagctatgccgagagcctgagcagctacctgcacagactggcccaggctcactgcctgaccacacagaaactggtcatgggcgagatcgcccctctgatcctgaaggacgaggaaaagtctgagctgctggccaagaacctgagccatctgctgggcaacagagatgccaagcctgccatcaacggcatgagagagatgaccggcaagctggtcaccgtgctggaagaactgaccatgcggcaggacctgcggtttctgacactgctgtcttggaagggcatgatctacgacaagggcctgttccgcaactacagagcctggtgtccttgctgctgggaaggctggaagcaagagaacaagacaatctacgagcccctgctgtggtccttcaaggacatcgagttctgtctgatccacaagcagcggctgatcgaggaatgccctcactgtggcagcagactgcccatgatggccagattttctccagccggcttctgcagccactgctatggatggctgggccaagagatcaagggcgaagaggaaatcgagaagtaccgcgtgaacatccagggcatctccgagctgattgccctgacacctgagctgggctacaagcccattcctatcgagctgacccggaaactgcagctgatcctgctggtgttcgagcaggccatcggcaaggatctgcagctcctgggagatctcggcggcatcatggaaagcctgagaatcgccagcaagaccaaccagagccagccttaccacctggtcaagctgatcatccccgtgtgcgagaaggccaagatcagcgtgtcccagctgttcggcagcgacttcaaagagctgggcaagatcctgtttggcaacttccggctggaactgaagctgtga

SEQ ID NO: 1174 - DNA, 2790 bp, Homo sapiens
  source 1..2790: mol_type = other DNA
atgctgagcgacatcgagttcgagcactggtgcagacggctgaacctgtctgagcaggcccggaaagtgatcgagcagatcagaaccagcgagcccagcagaagagtcggcggaggcaagaaaaacgtgtccggcagataccccagcagcaagatgggagtgtccatccagttcgagagccacagaaacgagctggcccacatctacaagctggaaaccgacgacgacgtgctcgagtactacgaccagcctcctcctatcttcctggactacctgagcaagaacggcagacggaactaccacagccacacacctgatttcttcgtgatcagaaagagcgccgctggctgggaagagtgcagcgtggaacagaacctgctgaagaaggtgcaggacagccccaaccggtggcagagacaagaggatggcacctggatctgcccacctggcaaagagtacgccgctcagttcggcctgtactacgttgtgcggtctagcgccgagatcaacagcatcttcctgcggaacttcgtgtggctggaagattacctgaacaaccagcagctgaccgtggacgacgagatcaccgatgccgtgtgcaacctggtcaagctgcagcctggaatcagcctggccaacatcatctaccagatcaaagaggccagcatcgacgacctgaacaccctgatcgccaccaaccaggtgtacgtggacctgaatacctacctgctggcccagcctgagaaagtgaaggtgttcctggacgaggaagaggccttcaccttcaaccagatcaccaaggtgtccgagcctcaggccattaacaagctgggcatcttcaaggccagcgtgggcaccagcatcttttgggatggctccaagtgggagatcgccaacaccggcgagaagtctatcgccctgatcacccaggacggcaagttcatcgacctgcctaaccacgtgttcgagacactcgtgcgggacaagaagatcaccagcctgcagacccctgaggaacccaccatcaatagcgaggtggaagaactgctgcggaaggccagcaccgaggacagaaaagaagccaccagccggtacaaggctatcgaggccttcctgaacggcaacagcagcaacaagcccaacagatcccagcggagatggatcgccagctaccggaaggccgagaaaacatacggcagaggcttcatcggcctgctgcctaagcacagagacaaaggctggcggagacagggcatccctgaagaggtcctgctgttcatgcagcagcacatcgagatcaattacgagaacatcaagcagcacagcatccggcacgcctaccagagcttcaaggacctgtgcaacgagaagggctacaagcctcctagcagcgagagctacagacaggccgtgcggaacagaccccagtacaagcagattcagaaacggatgggcgacagagccgcctacaaagaggaacccttctactggtacatccaccgcgaggaaacacctccacacggcgacagacctttcgagatctgccacatcgaccacaccgaagtggacgtggaactgctgtccgccatcatgctgaagctcggcatggacatcagcgtgatcaaagaaaaggcctccatgggcagaccctggctgaccctgatgctggatgcctacagcagacggatcattgccgcctatatgaccttcgacagcccctcctaccggtccaacatgatgatcctgaagatgtgcgtgcagagatacggcaggctgccccagatcattgtggtggatggcggagccgatttcggcggcacctactttgaaacactgctggcctacttccgcgtgaccaagaaagaaagacccgccgctaaggccagacacggctctgtgatcgagtcctactttggcgtggccgacaaagagttctggcacaacctgatgggcaacacccagatcacaaagaacgtgcggcaagtgaccaagtccgtgaatcccaagaacaacgctgtgtggaccctggccaagctgtactcctacttctgcgagtactgctacgagatctacgacacctgtcctcatcctgctctgcggatgtctcccagagaggcctttaacatcggcaccgccagaagcggcagcagagagcacaccttcatcaacgaagaggaattcaagttcctggctctgccctctccaaccgatagcgccggcaccagaaagatcacacaagagggcgtgaagatcaactacctctactactggcacagctgcttcagccggttcagaaacatcaaggtggaagtgaagtacgaccccttcgacatcacacaggcctacgcctacatcaacggcgagtgggtcaagtgccacagcagatacctgagagagctggaaggccacagcgagcgcgagctgatgattgctgctgccgagctgaagaaactgaaccggatccagaacaagcagttctccgacatcaccggcaagaagctggccgagttcttccggcggatcgagatggaagaagccgctcttgctcctccatggctcgaggccaagaaagccgtgctgcaacagagactgagagacagcgagctgaaacaggtgcacgcccagatcgagggcaagatcgatgagagcgagacaatcaccagcaccaacgtggaaaacagcgcctttatcaaggccgagcacctgaccaagcagtttaccgagagcagccagcaagagctggacgatgagaacctggtggaaagcttcgagcccctggaagagtggtga

SEQ ID NO: 1175 - DNA, 1185 bp, Homo sapiens; identical to SEQ ID NO: 1083
  source 1..1185: mol_type = other DNA

SEQ ID NO: 1176 - DNA, 639 bp, Homo sapiens
  source 1..639: mol_type = other DNA
atgatcgcccctctgatcctgtacctggatgtgcccttcgccaccttcagagagtctcacgccagagagatgggcaagacataccccgttcctccaccagccacagtgtacggcatgctgctgtctctcgtgggcgagacaaacgtgtacagacactgcggcgtggaactggccattgccatgctgagcagccccaagaagtcccggatcctgcggcagatgcggagattcaagaacgccaacttctctcaccccgagaacgtgatcccttgctaccaagagatcctgagcaacctgaagtgcctgatctgggtccgaagcgacgaggaaaagatccagcctagcctgagagagcggatccagctggcctttgatcaccctgaactcgtcagaagattcggctgcctgttcctgggcgagagcgaccagctgatcaagaccatcaagctggtgtccgaggactacctggaaggcgttagacagtgggccatccgggacaacagaggcagactgacactgccctattgggtcgaccacgtgggcagcagaaatacccggttcctgagataccggatcgagaagatgcccagcagcacccctcctgacctggcctggacaatgattcagagccccatctga

SEQ ID NO: 1177 - DNA, 663 bp, Homo sapiens
  source 1..663: mol_type = other DNA
atgatcgccaccagcatcaacagcgaggactacctggacctgaccttcaagctgagaggcgcccctattcctctggacaacggctacctgacatacgccgctctgagcagaatctgccctcctctgcacgaactgaagtccgtgggcattcaccctatcgccggcattcccaccagaaacaacctgctggaactgacagcccagagccggctgaagatcagaatctaccaccagcagatccctctgatctacccctacctggccggacaggcctttcacatcggccagaacttctaccagctggacatccccgactacaagcccctgatcagcagcgagagcgtgtacagcagactggtcatcatcaagggcttccaggacagcaccaacttcatcgaggccgtgcagcggcagatggacaatctgggaatccagggcaagatcgagctgctgaccagacaggatggcacccctcagagaaggcagctgaccatcaacaaagagggcaagcagttcaaagtgcgcggcttcggcgtgaagatctccaagctgaacctggaagatagcctgacactgcaagagcaaggcatcggcggcaagcggaagatgatgtgcggcatctttgtgcccgccaccagaagcaagagcgaagaggaaacctga

SEQ ID NO: 1178 - DNA, 969 bp, Homo sapiens
  source 1..969: mol_type = other DNA
atgatgagccagaagaagaacgacaacaacatccccaactactacctgtacggcaccgtgctgaccagatacggactggccagcctgaaccacgacatcagaagaggcaacaagaccatcctgcagaaaggctactggaacggcaagatccacagcttcgtgggcagcagcgccattagatgggccctgaggttctatctgcagaaacagggctacctggtcaacagagtgtgggacgaagatgagcacatcaacagactgaccagcgagtacttcgaccccgaggaattctacgacgacgacatcttcggcttcgccctgctggaaagcgccgagacagaagaggaagccagcaccaccaagcggaagaacaagcggaccaccgtgtctacccctaaccagagaatgggcgccctgggcatgaacatggccgtgtctctgacaccttacgatggcgccgtgaagctgggagccaagtctggcagagagaaggacagcaccagcctgcacttcaccgagtaccacgccaccagataccagtactacttcggcatcaacgtgacccacctgaaggacgtgtcccggatcctgcctctgatcgacggcatcatgaacctgccttgagtgggaggaagtagtaatatttttaattatcctttctgtcccgatagtttagtatttcactggacaaatcattttgcttcatatatttcctattgctttgaatattgcgatccaaaaagtaaggaagcaaaacttacaaaagagtttatagatgaagtggaatgcggacagattgaccatagtaaattgtggattgggggaacaattgttaaggaattacagcaattagataattttgataattctctttttaagaaggcgcatatttatcgtaatcgaaatgaactgattgaagctttgaaaacagtcattaaaagagatttgggcttagaagaatcaaaatga

SEQ ID NO: 1179 - DNA, 1578 bp, Homo sapiens
  source 1..1578: mol_type = other DNA
atggtgtccacacagcccaagatcagcctgtctctgcacgccgccgataccaccatcatgcacagagtgggcatgaccggcctgtacatgaccctgaagcggctggaaaagcagtaccctctgagcagacagcggggcgtgcacatcagctggtttctgacagccgacaccatcgagctgttctgggagggcagcgactttatcgccctgagctggctgatcaacgagagctttcagctggacgacaccggcctgatccacctcgttggcctggacaacgaccggatcgacctgagacagaagatccacatccacgagggaatctgcgccgtgttcctgcggctgaacaagttttaccaggccggcgagatcatcaacaccgagctgaccttcgaagagaagcaggtcgagtaccagtacaagagcctgacttggtacgcccaccagaccttcgccgagaagctgtgcgaagccgatacacagcagctgcggcacgactacatccagatcaccagctggctgtacctcggcggaattgtgcggcatgccagaacacagaacaccaccaagctggaagagaaacccgagtacgccctggctctgctgtttgtgcctgtcgtgtgccactactgcctgctgcacatccctagcgaggacctgaaagagagaaagccccacagctacctggtggtcatccccgagatcaaggacttcgaggatgccagccagagaagatggggactgcagcagctggaaacaaagcagttccacgtgtccagcctgggcgaagccggcctgctgtactacagctccgatgacatccagcctgaagtgggctactaccaggcctgccaagtgtggctgtacgaaaagaccaacaaggccagccggcagcggaccctgatgagcatcgaggaaatcaagatcgacaagaacatcctcatcacctaccagcaggtccagaagtactttaagaccaactaccagatcattaagtacaagcagatcttcatcaaagtgaacctgattcggagcctgatcgccgacaacctggtcaagggaatccactggtggtccaatttctgggagaagctggtcatcgaggacagcaagggctacctgttcaaccagctgttcagcaaccgcgagggcttcatcatcatggccgagaacagcgaagaggacaagtggtatctgatctttatgaaggtgttccagcaggccatgaagggcaacttcgccaagatctacgccaaggccgagagcggcaaggaccctcctatcaagaaaaaggtggaacggctgcgggccgagctgaactactgttacgatgagctgagctttcaagagtacctgagcgacttcctcgtcagaggcggcctgaacaaatacttcaacgagcaccaagaggaaatcgccctgctgatcaaaaagaccccttggcaagagctgcggatctggtccctgctggccattgccagctacaagcccaaggacaagcccaccaacagggacgatagcagcctgctgaacaaccagaaactcgaggacgtgaacgacgagagcgaggaagagtga

SEQ ID NO: 1180 - DNA, 990 bp, Homo sapiens
  source 1..990: mol_type = other DNA
atgaacatctacgaggaactgtggtcccctaagcctctggaaatccctcagcggagccggctgttctgtctggaacctgttggagtgggcacccctcacacagagagcctgagcagctacctgaacagactggcccaagagcactgcctgacagcccagaaactgatcatgggcgagatcgccctgctgatcctggaaaacgaggacaagagcaagctgctgcagaaaagcgtgtcctacctgctgggcaacagcgacgccaagcctgccatcaatggcatgagagagatgaccggcaagctggtcaccgtgctggaagaactgaccatgcggcaggacctgcggtttctgacactgctgtcttggaagggcatgatctacgacaagggcctgttccgcaactacagagcctggtgtccttgctgctggcaagagtggatgcaagagaacaagacaatctacgagcccctgagctggtccttcaaggacgtggaattctgcctgatccacaagcagcggctgatcgagcagtgtcctcactgtggcagcagactgaccgtgatggccagattttctcctgccggcttctgctccagatgctatggctggctgggccaagagatcaagggcgaagaggaaatcgagaagtaccaagtgaacatccagggcatcaacgagctgatcgctctgacacctcagctgggctacaagcccattcctatcgagctgacccggaaactgcagctgattctgttcgtgttcgagcaggccatcggcaaggatgtgaagctgctgggagatctgggcgtgatcatggaaagcctgagaatcgccagcaccaccaaccagagccagccttaccacctggtcaagctgatcatccccgtgtgcgagaaggccaagatcagcgtgtcccagctgttcggcagcgacttcaaagagctgggcaagatcctgtttggcaacttcagcctggaactgaagctgtga

SEQ ID NO: 1181 - DNA, 2700 bp, Homo sapiens
  source 1..2700: mol_type = other DNA
atggtcaaccagatccggacaagccctcctgccagaaaagtgaaaggcggcggaagaaacgtgcacggcttttacgccagcagcaagatgggcagaaccatccagttcgagagccacaccgtggaactgcccgccatcacacagttctacgagtacgacgaccaggtgctggaatactgggaccagcctatcaagttcagcatcaagtgcagccctcagggcaagcaggccaccaccatcagccactatcctgatttcttcgtgatgcggaagaacttctgcggcttcgaggaatggaaaaccgagaagcggctggaaaagctgagcggcgaacagccccacagataccagaaaatcgaaggccagtgggtcgacgtgatcgtgcaagagtacatcgagagcctgggctactactaccggctgagaagcgacagcgagatcgactggatcaagtaccggaaccagaagtacctgcagagctacaagcagggctacctgaatcaagagtatatcctgaacgaccagatcgaggccaatgtgcaagagatcatcgtgaactaccccggcatcaacctgaccaacctgctggaaaaagccaagaacgccaccatcgacgacatcaacaccctgatcgccctggaaaaggtgtacgtgaacctgagcgaagtggccctggtggaccaagagaaagtgcacctgttcagagatcaggccaccgccgaggcctacatcaccgtgacacacgattactgcgagcccgtgtccagcaacgtgtccattgtggaactgaaagtgggcagcagcttcctgctggacggcaagagcctgaccatcgatcacatcggcgagagcaagatcatcctgagaggcgagcagggcatcatcagatggacctacgccgagttccagcagctgatcgagctgggcgagatcagcaacctggaaacagagaaccacaccacactggacgaggaaggctggcagtacttcctggaagctagccccaaggctctggaaatcgccaactacagatacgccgccatccagccttttctgggcaaagaggccgacaacagccagaagtgcgacgacctgtctgagcggaccctgagagattggaaggccaagtacagaaaggcccagcagaagtacggctgcggctttatcggactgatccctcagtacaagggcaaccccacacctcggtacagcgacgaggacctggaattcatcgacaaagtgatcaaagagcagtacgagacacccaagcagaaaaacgtgtggcagacctacaagtttctcgaggacaagtggcagaaagaaggccggatcagccctgtgcctagccacaccttctactacgagagagtgaagaagcggaacagctaccagcagaccaagaacagaagaggcagcagagccgccaacaacctgcttggcccttggctgattcagcccaccacacctagacacggcgacagacccctggaaattgtgcacatcgaccacaccaagctggatgtggaatgcatctgcccctacagcggcaagaacctgggcagaccttgggtcaccggaatgatcgacgcctacagccggaagattctggccctgtacctgacattcgatcaccccagctaccggtcctgcatgatggccattcggatctgcatccagagattcggcagattccccgagctgatcgtggtcgacaacggcaaagagttcagaagcacctacttcgacaccctgctggccagattcgacgccaacaagaagcacaggcccaaggattgccccaagttctccagcatcatcgagcgttggttcggcagccagaacaccgagttcatcaacaatctgcggggcaacacccagatcatgaagcacgtgcggctggtcaagaaggccaacaatcctaagagcctggccgtgtggaacctggaagaactgtacgactacctggcctttggctacgcctacggcgtgtacgataaggccgaacatcctgctctggaaggcatgagccctcacaaggcctttgaactgggcctcgccaagacaggccacagacctcaccagtacatcaaatacgacgagcagttcaagatcctgacactgcccaccaacaacaagggcaccgccaaagtgattcccggccagggcattagagtgaattaccagaactactggaccgacgagttctacagcgtggaaaaccagagcatccccgtcagatacgaccctctggattacggcgtgacctatgcctacgtgaacaaccactgggtcaagtgcctgagcaactactacatgaagtttcagggccacagcgagaaggccgtggccattgccaccacaatctgcagacggaagcggcagatctacaaccagagccagtacgtgggctccaaagaaatcgtggacctgctgaacaacgccgaggaacacgaggaactgatcctgcagattcggagggaccagagcgccaagctggtgttcaatctgatcgagggcaacctgagcagcgccgtgctgctgaatgtgtccaacatcgagcagcacagcagccaggactcccagaccatcgagaagaatctggacctgatcgacctgaaagaggaaaacagccagcctagcatccccaagaagttcaaccccgacgagatccaggtgttcgccgaagaggaactgtggtga

SEQ ID NO: 1182 - DNA, 1119 bp, Homo sapiens
  source 1..1119: mol_type = other DNA
atggtcaccaaccggcggttccctcaagagtttctgcaggcccctaccgacaacaagctgaagtactttaaggacatcatcgtgccccaccggaacatcaagctggtgctggaacagctgctgaagaacgccatcgagcccgatgatgccctggtgtacctggtgtttggagtgacaggcgtgggcaagagcagactgaaggccgagttcgagaagagactgctgaagcacttcgccgacaagatcatcagcaaccccggcagcctggttgttggcggcattgaagttgatggcgccgaaggcggcaagttcaactacagcgactactacatccaggtgctcgagagcctgaaagaggtgctgatcgactacaaagaaaactacggcgtggacctcgaggacgacaacagcgacaatctgatcggcgaccacgagggcaagaacgctaaggccctgcggagaacaatgcagaaggtgttcctgcaccggcagctgaaggcttacacactggatgaagcccagcacctgttcgacgttgcaggcggcagacagatcaacgtgcagatgaactggctgaagtccctggccaacaagacccagaccgtgcacatcctgttcggcacctacgaactgctgaaatgccaagaagtgaacggccaagtcggcaggcggagcgaggattactacctgcctccttactatctgaccaagagcgaggaccagcaagagttcatcaaagtgatcaagaccctgcagcagtacctgcctgtggaagatgagccccagctggaagaacactgggagtacttcatggaatactccatcggctgcgtgggcatcctgaagtcctggtggtatcgggccctgaagaatgcccttgatgagggcgccaagaccgtgcggatgaaggacttcaaggccagagaactgagcgccggcagaagaaagaccatccagaaagagctggaagccggcgagtccagactggccttcctgtacaagaacgaggaaaagatcgagaagcccaagagcatgaacagccagcctgtgaagaagggcagaaaagtcggcgagcggaaagtgggcagagatctcgtgggagtgaatcaagagggctga

SEQ ID NO: 1183 - DNA, 639 bp, Homo sapiens
  source 1..639: mol_type = other DNA
atgatcgcccctctgatcctgtacctggatgtgcccttcgccaccttcagagagtctcacgccagagagatgggcaagagctaccctgttccacctcctgccacagtgtacggcatgctgctgtctctcgtgggcgagacagacgtgtacagacactgcggagtggaactggccattgccatgctgagcacccctaagaagtcccggatcctgcggcagatgcggagattcaagaacgccgacttctctcaccccgagaacgtgatcccttgctaccaagagatcgtgtccaacctgaagtgcctgatctgggtccgaagcgacggcgagaagatccagcctagcctgagagagagaatccagctggccttcgatcaccccgaactcgtcagaagattcggctgcctgtttctgggcgagagcgaccagctgatcaagaccatcaagctggccagagaggactacctggaaggcgttagacagtgggccatccgggacaacagaggctctctgacactgccctattgggtcgaccacgtgggcagcagaaatacccggttcctgagataccggatggaagagatctccagcagcagccctcctgacctggcctggacaatgattcagagccccatctga

SEQ ID NO: 1184 - DNA, 663 bp, Homo sapiens
  source 1..663: mol_type = other DNA
atgaccgccaacttcatcaacagcgaggaatacctggacctgaccttcaagctgcggggcagccctattcctctggacaacggctaccctatctacagcgccctgagcagaatctgccctccactgcacgagctggacagcatcggcattcaccctatcgccggcattcctaccagcaacaacttcctggaactgacagcccagagccggctgaagatcagaatccaccaccagcagatccctctgatctacccttacctggccggacaggcctttcagctgggccagcacttttaccagctggacatccccgactacaagcccctgatcagcagcgagagcgtgtacagcagactggtgctgatcaagggatttcaggaccccaccaatttcatcgaggccgtgcagagacagctggatagcctgggaatccagggcaagatcgagctgctgaccagacaggatggcacccctcagagaaggcagctgaccatcaacaaagaagagaagcagttcaaagtgcgcggcttcggcgtgaagatctccgagctgaatagcgaggacagcctgacactgcaagagcaaggcatcggcggcaagcggaagatgatgtgcggcatctttgtgcccgccaccagatccaaagaggaagaggaaacctga

SEQ ID NO: 1185 - DNA, 957 bp, Homo sapiens
  source 1..957: mol_type = other DNA
atgatgagccagaagaaaaacaacaacaatatccccaactactacctgtacggcaccatcctgaccagatacggcctggccagcctgaaccacgacatcagaagaggcaacaagaccacactgcagaaaggctactggaacggcaacatccacagcttcgtgggcagcagcgccattagatgggccctgaggttctatctgcagaaacagggctacctggtcaacagagtgtgggacgaagatgagaacatcaaccggctgaagtccgaggacttcgaccccggccagtactacgacgacgacatctttggcttcgccctgctggaaagcgccgagacagaggaagataccagcaccaccaagcggcggaagaagcagaagaaagtctctagccccaaccagcggatgggcgccctgggaatgaatatggccgtgtctctgaccccttacgatggcgccgtgaagctgggagccaagtctggcagagagaaggacagcaccagcctgcacttcaccgagtaccacgccaccagataccagtactatttcggcatcaacgccacacacctgaaggacttctcccggatcctgcctctgatcgacggcatcatgaacctgcctaaagtcggcggcagcagcaataccttcaactaccctttctgccccgacagcctggtgttccagtggaccaacaacttcgccagctacatcagctactgcttcgagtactgcgaccccaagagcaaagaggccaagctgaccgaggaattcatcgacgaggtggaatgcggccagatcgaccccaatcagctgtgggttggaggcaccatcgtgaaagagctgcagcagctggacaacttcgacaacagccccttcaagaacgcccacatctaccggaaccggaacgagctgattgaggccctgaaggccgtgatcaagcgcgatctgggactgtga

SEQ ID NO: 1186 - DNA, 1578 bp, Homo sapiens
  source 1..1578: mol_type = other DNA
atggtcaccacacagcccaagatcagcctgtctctggatgccgccgacaccaccattatgcacagagccggaatgaccggcctgtacatgaccctgaagcggctggaaaagcagtaccccagcttccaccagagaggcggacacatcagctggtttctgaccgccgataccatcgagctgttctggcagggcagcgattttgtggccctgagctggctgatcaaagagagctttcagctggacgacaccggcctgatccacctgacaggcctggacaacgacggcatcaacctgcggcagaagatccacatccacgagggaatctgcgccgtgttcctgcggcacaaccagttttatcaggctggcgccatcgtgaacaccgagctgaaggtggaagagaagaaggtcgagtaccagtacaagagcctgatttggtacgcccaccagagcttcgccgagaagctgtgcgaagtggatacccagcagctgcggcaggactacgtgcagatcacaagctggctgtacctcggcggaattgtgcggcacgccagaacaaaggataccaccaagctggaagaaaagcccgagtacgccctggctctgctgtttgtgcctgtcgtgtgccactactgcctgctgcacatccctagcgaggacctgaaagagaaaaagccccactgctacctggtggtcatccccgagatcaaggacttcgaggatgccagccagcggagatggcagctgcagcagctcgagacaaagcagtttcacgtgggcagcctgggagaagccggcctgctgtactatagcctggacgatattcagcccgagggcgactactaccaggcctgccaagtttggctgtacgagaagatgaaccagaccagccggcagcggaccctgatgagcatcgaggaaatcaagatcgaccggaacaccctgatcacctaccagcaggtccagaagtactttcagaccaactaccagaagatcaagcccaagcagatcttcatcaaagtgaacctgattcggagcctgatcgccgacaacctggtcaagggaatccactggtggtccaacttttgggagaaactggtcatggaagatagcaagggctacctgttcaaccagctgttcttcaaccgcgagggcttcaccatcatggccgagaagtccgaagaggacaagcagtatctgatcttcgtgaaggtgttccagcaggccatgaagggcaacttcgccaagatctacgccaagaccgaggaaggcaagaagtcccctatcaagaaaaaggtggaacggctgcgggccgagattaactactgctacaacgagctgagcttccaagagtacctgagcgacttcctcgtcagaggcggaatcaacaagtacttcaacgagcagcaagaggaaatcctgctgctgatcaagaacagcccctggcagaagctgaagatttggagcctgctggccattgccagctaccagcctaaggataagccagccaagggcgacgacagcagcttccccaacaatcagaaactgggcgagatgaacgacgagagcgaggaagagtga

SEQ ID NO: 1187 - DNA, 990 bp, Homo sapiens
  source 1..990: mol_type = other DNA
atgagcatctacagcgagctgtggtcccctaagcctctgaagatccctcagcggagccggctgtttagcctggaacctgtggctgtgggcaccccttacacagagagcctgagcagctacctgaaccggctggcccaagagcactgtctgaccagccagaaactgatcatgggcgagatcgcccctctgatcctgaaggacgaggacaagtctgagctgctggccaagaacctgagccatctgctgggcaactccgatgccaagcctgccatcaacggcatgagagagatgaccggaaagctggtggccgtgctggaagaactgaccatgagacagaacctgcggtttctgaccctgctgagctgcaagggcatgatctacgaccggggcctgttcagaaactacagagcctggtgtccctgctgctgggaagagtggaagcaagagaacaccaccatctacgagcccctgctgtggtctttcaaggacgtggaagtgtgcctgatccacaagctgcggctgagagaggaatgtccccactgcggatctagactgcccgtgatggctagactgtctcctgccggcttctgcagcagatgctatgagtggctgggacaagagatcaagggcgaagaggaaatcgagaagtaccgggccaacatccagggcatctccgagctgattgccctgacacctcagctgggctacaagcccattcctatcgagctgacccggaaactgcagctgatcctgctggtgttcgagcaaggcatcggcaaggacctgaagctgctgggcgatctgcagggcatcatggaaagcctgagaatcgccagcaccagaaaccagagccagccttaccacctggtcaagagcatcatccccgtgtgcaagaaggccaagatcaacattgcccagctgttcttcagcaactacaaagagctgggagagatcctcttccggaacttcaacctggaattccggctgtga

SEQ ID NO: 1188 - DNA, 2808 bp, Homo sapiens
  source 1..2808: mol_type = other DNA
atgctgcggtacttctacagacagctggaagccatcctgggcagaatcgccatgctgagcgacggcgaatttcaggcttggtgcgacagactgcagctgagccagcagcagagagactgggtcaaccagatccggacatctcctccagtgcggaaagtgaagggcagctccagaaatgtgcacggcccttacgccagcaagaagatgggcagaaccatccagttcgagagccacaccgtggaactgcccgctctgatccagttctacgagaacgacgacagcgtgctggaatactgggaccagcctatcaagttcaccatcaagtgcagccctcagggcaagcaggccaccaccatcagccactatcctgatttcttcgtgatgcggaagaaccagtgcggcttcgaggaatggaaaaccgagaagaagctgagcaagctgtccaaagagcaggcctacagataccagaacctggaaggcaaatgggtcgacatcatcgtgcaagagtacgtggaaaacctgggctactactacagcctgcggagcgacagccagatcgattgggtcaagtaccggaaccagaagtatctgcagccctacaagcagggctacctgcaccagcagtacatcctggacgaacaggtggaatttcacatcaaagagatcatcatcaacaaccccggcatcaacctgaccaacctgctgaagaaggccgagaacgccaccatcgacgacatcaacacactgatcgccctggaaaaggtgtacgtggacctgagcgccattgctctggtggaacaagagcgggtgcacctgttcagagatcaggccacagccgaggcctacatcaccgccacacacgattacagcgagcccgtgtccaacagcgtgcagatcgtggatctgaaagtgggcagcagcttcctgctggacagaaagagcctgaccatcgatcacatcggcgagagcaagatcatcctgagaggcgagcagggcatcatcagatggacccacgctgagttccagcagctggttgagctgggcgagatcacatgcctgcagacaaaagagcagaaaaccctggacgaggaaggctggcagcagtacttcagagaggctagccccaaggctctggaaatcgccaaccagagataccaggccatcaagcccctgctggatggcgagagctacgacagcctggactgcaatgtgcccgagagaaccctgagacagtggaaggccaagtacagaaaggccaagcaagagtatggcgtgggcctcgtgggactgatccctcagtataagggcaaccccacacctcggtacagcgacgaggacctggaattcatcgacaaagtgatcgaggaacactacgagacattcaagcagaagaacgcctggcagacctacctgatgctgcgggacaagtgggaagagagcggcctgaacagccccattcctagccacaccttctactacgagagactgaagaagcggaacagctaccagcagaccaagcggagaatgggaagcagagccgccaattctctgctcggcccttggctgatcaagcccaccacacctagacacggcgacagacccctggaaattgtgcacatcgaccacacacagctggacgtgcagtgcatctgcccctactccaagaagaatctgggcagaccttgggtcaccggcatgatcgatgcctacagcagacggattctggccctgtacctgacctttgatcaccccagctaccggtcctgcatgatggccattagaatctgcgtgcagagattcggcagattccccgagtggatcgtggtggacaacggcaaagagttccagagcacctacttcgagacactgctggccagattcgaggcctctaagaagcacagacccaaggacgtgccaaagttcagcagcatcatcgagcgttggttcggcagccagaacaccgagttcattaacaacctgcggggcaatacccagatcatgaagcacgtgcggctggtcaagaaagagaacaaccccaagaacctggccatctggaatctggaagaactgtacgactacctggccttcggctacgcctacggcgtgtacgatagagccgaacatccagctctggaagggatgtctccacagcaggcctttgaactgggcctcgccaagacaggacacagaccccaccagtacattaagtacgacgagcagttcaagatcctgacactgcccaccaacaacaagggcaccgccaaagtgattcccggcaagggcatcagaatcaactaccaggactactggtccaacgagttctacagcgtggaaaatcagagcgtgcccgtcagatacgaccctctggattacggcgtggcctacgcctatgtgaacaaccactgggttaagtgcctgagcaactactacatgaagttccagggctacagcgagaaggccgtggaaattgccagcaccgtgtgcagacggaagcagcagaagtacaaccagagccagtacatcggcttcaaagaaattgtggacctgctcaacaacgccgaggaccacgaggaaatcatgctgcagatccggcaggacagatccgccaagctggtgtacaatctgatcgagggcacactgagcagcgccgtgctgaatagcgtggacatcaagcagcccagcgagcctaagaccaaagagattgaagaggccatcttcgacagagaagaggccgtgctgcagcctagcctgtccagagagatcaacctggacaacattcagcccttcgccgacgaggaactgtggtga

SEQ ID NO: 1189 - DNA, 1116 bp, Homo sapiens
  source 1..1116: mol_type = other DNA
atgaccaacaaccggcctttcttcctggaaatcctgcagcagagcaccgagaacaagctcaagtacttcaaggacgtgaccgtgcctcaccggaacatcaagctgatcctggaccagctgctgaagaacgccatcgagcctgatgacgccctggtgtacctggtgtttggagtgacaggcgtgggcaagagcagactgaaggccgagttcgagaagagactgctgaagcacttcgaggacgagatcatcagcaaccccggcagcctgatcgttggcggcatcgaagtggattctgccgaaggcggcaagttcaactacagcgactactacatccaggtgctcgagagcctgaaagaggtgctgatcgactacaaagagaactacggcatcgacctcgagaacgacaacgaggacaacctgaccggcgatcacgagggcaagaatgccaaggctctgcggcggacaatgcagaaggtgttcctgcacagacagctgaaggcctacacactggatgaggcccagcacctgtttgacgtggcaggcggcagacagatcaacgtgcagatgaactggctgaagtctatcgccaacaagacccagaccgtgcacatcctgttcggcacctacgaactgctgaaatgccagcaagtgaacggccaagtgggcagaagaagcgaggactactacctgcctccttactacctgaacaaggtcgaggaccaagaggaattcttcaagatcatcaagaccctccagcagcacttccccgtggaaaatgcccctcagctggaaaagaacggcgagtacttcatggaatactccatcggctgcgtgggcatcctgaagtcctggtgttacagagccctgaagaatgccctggacgacaaggccaagacagtgcggatgaaggacttcaaggccagagagctgagcgccggcagacggaacaagatcaaagaggaactggaagccggcgagcggctgtttgccagcctgtacaatgacggcaacctgaagaaaaccgaggccaccgatagcagcagccccaagagaggtggaagagtcggcgagcgcaaagtgggaagagatctcgtgggaatcaatcaagagggctga

SEQ ID NO: 1190 - DNA, 639 bp, Homo sapiens
  source 1..639: mol_type = other DNA
atgaccacacctctgatcctgtacctggacgtgcccttcgccaccttcagagagtctcacgccagagagatcggccggacatatcctgttcctccaccagccacagtgtacggcatgctgctgtctctcgtgggcgagacagacatctacagacactgcggcatcgagatcgccatcggaatgctgagcgagcccagaaagagccagatcctgcggcagatgcggcggttcaagaacgccaacttctctcaccccgagaacgtgaaccccagctaccaagagatcctgagcaacctgaagtgcctgatctggctgagaagcgacggcgagaagagacagcccagcctgagagacagaatccagagcgccttcgactaccctcagctggtcaagagattcggctgcctgtttctgggcgagagcgaccagctcatcaagaccatcaagatcgtgtccgaggaataccccgaaggcgtgcggagatgggtcatcagagacaacagaggcagactgaccctgccttactgggtcgaccacgtgggcatcagaaacacacggtccctgcggtacagagtggaagagatcgacagactgctgcctcctgacctggcctggaccatgatcaagagccccatctga

SEQ ID NO: 1191 - DNA, 666 bp, Homo sapiens
  source 1..666: mol_type = other DNA
atgatcgccacacacatcaacagcgaggaatacctggacctgaccttcaagctgagaggcgcccctattcctctggacaacggctacatcatctacgccgctctggccaggatctgccctcctctgcacgaactgaacagcatcggcattcaccctatcgccggcattcctaccagcaacaacttcctggaactgaatgagcagagccggctgatcatccggatccaccaccagcagatccctctgatctacccctacctgacagcccagaccttccagatcggccaagagagctaccagctgaacatccccgactaccagcctctgatcgccagcgagagcctgtactctagactggtggtcatcaccggctttcagaaccccagcaccttcatcgaggccgtgcagagacagctggacaacctgggaatccagggcaagatcgagctgctgaccagacaggatggcacccctcagagaaggcagctgaccatctctaagcagggcagacagttcaagattcgcggcttcggcatcaagatcagcgagctgaaccccgaggacagcctgatcctgcaagagagaggaatcggcggcaagcggaagatgatgtgcggagtgtttgtgcccgccaccaggaccaaagaggaagaggaaacccagtaa

SEQ ID NO: 1192 - DNA, 972 bp, Homo sapiens
  source 1..972: mol_type = other DNA
atgaaccagaacaacaacgacaacaagatcctgaactactacctgtacggcaccgtgctgaccagatacggactggcctctctgaaccacggcatgagacagggcaacaagaccctgctgcagaaagtgtattggtacggcaagatccacagcctggtgtccagcagcgccattagatgggccctgcggttctatctgcagaaaaaggcctacagcatcaaccgcgtgtgggacgaagatgagcacatcaacagactgaccagcgaggacttcgaccccgagcagttcctggacgacgacatctttggcttcgccctgctggaaagcgccgagactgaaggcgacgccagcaccaccaagaagcggaagaagcagaccaagctgagcacccctaaccagagaatgggcgccctgggcatgaacatggccgtgtctctgacaccctacgacggcacactgaagctgggagccaagagcggcagagagaaggatagcaccagcctgcacttcaccgagtaccacgccaccagataccagtactacttcggcatcaacgccacacacctgaaggaccccagcagaatcctgcctctgatcgacggcatcatggaactgcctaaagtcggcggcaacagcaatatcttcaactaccctttctgccccgacagcttcatcttccagtggaccagccacttcgccagctacatcagctactgcttcgaggcctgtgacggccacggcaagggaaagcaagtgaagctgaccaaggacttcatcggcgaggtggaatgcggccagatcaaccccgatgatctgtggatcggcggcagcatcgtggaagaactgcagcagctggaaaacttcaagcagagcaacctgtctaaggcccacctgaaccggaacagaaacgagctgatcgaggccctgaaggccgtgatcaagagagatctggaactggaaaagtcccagtga

SEQ ID NO: 1193 - DNA, 1575 bp, Homo sapiens
  source 1..1575: mol_type = other DNA
atgatcgtggccacacagcccaagatcagcctgagcctggatgccagcgacaccaccatcatgcacagagtgggcatgaccggcctgtacatgaccctgaagcggctggaacagaagttccccgacagcagaaatagagccggccacctgtcttggctgctgacccctgataccatcgagctgttttgggccggcagtgatgtggtggctctgagctggctgatgcaagagagctttcagctggacgaccggggcctgattcagctggctggcctggaaaacgacgccatggaactcgagcagaagatccacatccacgagggaatctgcgccatcttcctgcggcacaacaagttctacaaggccggcaaccaggccaagaccaagctgaccgtggaaagccaagaggtggaataccagtacaagcccctgctttggtacgcccaccagacatttgcccagcacctgtgcgagatcaacacccagcagctcaagcaggactacctgcagttcacctcctggctgtatctcggcggagtcgtcagacacgccatgctggaaaaagtgacaaagctggaagccaagcctgagtacgccttcgctctgctgtttgtgcctgtcgtgtgccactactggctgctgcacttccctagcgaggacctgaaagagcggaagccccacagatacctggtggtcatccccgaagtgaacaacttcgaagaggctagccagcggagatggcgactgcagcaactggctgtgaagcagctgcacgtgtccagcattgaggaagccggcctgctgtactacagcctggacgaggttcagcaggacgataactactaccaggcctgccaagtgtggctgtacgagaagatgaacaagatgagccaccagcggaccgtgatgagcatcaaagagatcgacatcgacaaggacatcctgatcacctaccaggtggtccagcagcagttccagcctaactaccagcacatcaacagcaagaaaaacctcatcaccgtgaacagcattcggagcctgatcgccgagaatctcgtcagaggactgccttggtggtccaacttctgggagaagctgatcgtcgaggacagcaagggctacctgttcaaacagctgctgtacaatcggaggggcgtgaagttcatggtggaaggcagcgagcagaaagagaagtgcctgaccttcgtgaacgtgttccagcacgccatgagcgtgtacttcgccaaggtgtacgccaagaccgacaagggcaaagaggcccctatcgagaagagagtggaacggctgagagccgagctgaattgctgctacgacgagctgagcttccagcagtacctggccgatttcctggctagaggcggcctgaacgagtacttctacgagaacaaggaccgggtgctgctgattatcgaggaagtgtcctggaagaagctcagagtctggtccctgctggccattgcctcctacaagcccaaagagaagcacaccaacaccaacgagaacagcagccccgacacacagaaactggaaggcgtgaacgacgagagcgagtga

SEQ ID NO: 1194 - DNA, 990 bp, Homo sapiens
  source 1..990: mol_type = other DNA
atgagcatctacgaggaactgtggtcccctaagctgctggaaatccctcagcggagccggctgtttagcctgaagcctgttggcatcggcaccctgaataccgagagcctgagcagctacctgaaccggctggcccaagagcactgtctgaccagccagaaactgatcatgggcgagatcgcccctctgatcctgatcaacgaggacaagagcgagctgctgaccaagagcgtgaaccatctgctgggcaacagcgacgccaagcctgccatcaatggcatgcggcagatgaccagacagctggtcacagtgctggaacagctgaccatgcggcaagagctgcactttctgaccctgctgtcttggaagggcctgatctacgaccggggcctgttcagaaacaacagagcctggtgtccctgctgcctggaagagtggaagcaagagaagaaaacaatctacgagcccctgctgtggtccttcaaggacgtggaagtgtgcctgagccacaagcagagactggtggatgagtgccctcactgcggatctagcctgcctgtgatcgccaagtctagcagcagcggcttctgcagccactgctaccaatggctgggcatcgagacagagggcaaagaggacatcgagaagtaccgcgtgaacatccaaggcatcggcgagctgattgccctgacacctcagctcgagtacaagcccatcagcatcgagctgacccggaaactgcagctgatcctgctggtgttcgagcaggccatcggcaagaacctgaaactgctgggcgagctgggcaagatgatggaacaactgaagatcgccaccaagcagcaccagaacaagccctaccacctggtcaagctgatcatccccgtgtgcaagaaagccaagatcagcgtgtcccagctgtttctggccaacttcaaagagttcggcgagatcctgttcgagaacttcggcctgaagctgcggctgtga

SEQ ID NO: 1195 - DNA, 2754 bp, Homo sapiens
  source 1..2754: mol_type = other DNA
atgctgagcgacgccgagtttcagacttggtgcgatagcctgcagctgagccagcagcagagagatctggtcaatcagatccggacaagccctcctgccagaagagtgaaaggcggcggaagaaatgtgcacggcccttacgccagctccaagatgggcagaaccatccagttcgagagccacaccgtggaactgcccgccatcacacagttctacgagtacgacgacaccgtgctggaatactgggaccagcctatcaagttcagcatcaagtgcagccctcagggcaagcaggccaccacaatcggccactatcctgatttcttcgtgctgcggaagaaccactgcggcttcgaggaatggaaaaccgagaagcggctggaaaagctgagcgaggaacagccctaccgctaccagaaaatcgaaggccagtgggtcgacgtgatcgtgcaagagtacctggaaaacctggggtactactactacctgcggagcgacagcgagatcgactgggtcaagtaccggaaccagaagtacctgcagagctacaagcagggctacctgaagcagctgtacatcatcgacgaacaggtggaagccaacctgaaagagatcatcatcaactaccccggcatcaacttcaccacactgctggaaaaagccaagaacgccaccatcgacgacatcaacaccctgatcagcctggaaaaggtgtacgtgaacctgtccgaggtggccctggtggaacaagagaaagtgcacctgttcagagatcaggccaccgccatggcctacatcacagccagccacgactacagagagcccatcagcagcagcgtgcagatggtggatctgaaagtgggcagcagcttcctgctggacggcaagagcctgaccatcgatcacatcggcgagagcaagatcatcgtgcggggagagcagggcatcatcagatggcagtttgccgagttcgagcagctggtcaagctgggcgagatcagcaatctgcagaccgagtctcacacaaccctgaacgaggaaggctggcagtacttcctggaagctagccccaaggctctggaaaccgccaactacagatacgccgccatcaagccctttctggatggcaagccctacaacagccaagaagagaacctgagcgagcggaccctgagacactggaaggccaagtacagaaaggcccagcaagagtatggcagcggcttcatcggactgatccctcagcacaagggcaacagcacccctagatactgcgacgaggacctggaaatcatcgaccaagtgatcgaggaacactacgagagcttcacccagaaaaacgtgtggcagacctacgagatcctgaaggaccggtggaaagagctgcgccagattagccctctgcctagccacaccttctactatgagagagtgaagaagcggaacagctaccagcagaccaagaaacggatgggctccagagccgccaacaactatcttggcccctggctgatccggcctaccacaccaagacatggcgaccggcctctggaaatcgtgcacatcgatcatacccagctggacatccagtgcgtgtgcccttacagcggcaagaacttgggcagaccttgggtcaccggaatgatcgacgcctacagcagacggattctggccctgtacctgaccttcgacaaccccagctaccggtcctgcatgatggccattagaatctgcgtgcagagattcggcagattccccgagtggatcgtggtggacaacggcaaagagttcagcagcacctacttcgaaaccctgctggccagattcgaggccagcaagaagcacagacccaaggattgccccaaattcagctccatcatcgagcgttggttcggcagccagaacaccgagttcatcaacaacctgcggggcaatacccagatcatgaagcacgtgcggctcgtgaagaaggccaacaatcccaagaacctggccgtgtggaacctggaagaactgtacgactacctggcctttggctacgcctacggcgtgtacgatagcacagaacaccctgctctggaaggcatgagccctcagaaagcctttgagctgggcgtgaccaagaccggccatagacctcaccagtacatcaaatacgacgagcagttcaagatcctgacactgcccaccaacaacaagggcaccgccaaagtgatccccggcaagggcatcagaatcaattaccaggactactggaccgacgagttctacagcgtggaaaaccagagcgtgcccgtcagatacgaccctctggattactctgtggcctacgcctatgtgaacaaccactgggttaagtgcctgagcaactactacatgaggtttcagggccacagcgagaaggccgtggaaatcgccacaaccatcggcagacggaagcggcagtcctacaaccagtctcagtacctgggcagcaaagaaatcgtggacctgctgaacaacgccgaagaacacgaggaactgctgctgcagatcagaagggaccagagcgccaagctggtgtacaacctgatcgagggcaagctgtctagcgccgtgctgaatgccgccagcatcgagtatcccagctctcagaacaaccgggaaatcgagaagtccatcctcgagatcgaagaggacgtgctgcctagcagcctgtctagagagatcaacttcgacaatatccaggccttcgccgaagaggaactgtggtga

SEQ ID NO: 1196 - DNA, 1116 bp, Homo sapiens
  source 1..1116: mol_type = other DNA
atggacaaagagcggcggttccctcaagagatcctgcaagagacaaccgacaacaagctcaagtacttcaaggacgtgatcgtgccccaccggaacatccggctgattctggaacagctgctgaagaacgccatcgagcccgatgatgccctggtgtacctggtgtttggagtgacaggcgtgggcaagagcagactgaaggccgagttcgagaagagactgctgaagcacttcgagaacgagatcatgagcaaccccggcagcctggttgttggcggcattgaagttgatggcgccgaaggcggcaagttcaactacagcgactactacatccaggtgctcgagagcctgaaagaggtgctgatcgactacaaagagaactacacgatcaactttgagaacgacaacgaggacaacctgatcggcgaccacgagggcaagaatgccaaggctctgcggcggacaatgcagaaggtgttcctgcacagacagctgaaggcctacacactggatgaggcccagcacctgtttgacgtggcaggcggcagacagatcaacgtgcagatgaactggctgaagtctatcgccaacaagacccagaccgtgcacgtgctgtttggcacctacgaactgctgaaatgccaagaagtgaacggccaagtcggcaggcggagcgaggattactacctgcctccttactatctggacaagagccaggaccagcaagagttcatcaaagtgatcaagaccctgcagcagtacctgcctgtggaagatgagccccagctggaagaaagatgggagtacttcatggaatactccatcggctgcgtgggcatcctgaagtcctggtggtatcgggccctgaagaatgccctggacgatgtggccaagaccgtgcggatgaaggacttcaaggccagagaactgagcgccggcagaagaaagaccatccagaaagagctggaagccggcgagtccagactggcctacctgtacaatgaggaaaaggccatcaagcctgagctgaccgacagccagcctaccaagaaaggcggaaaagtgggcgagcgcaaagtgggcagagatctcgtgggagtgaatcaagagggctga

SEQ ID NO: 1197 - DNA, 4223 bp, synthetic construct
  misc_feature 1..4223: note = Synthetic
  source 1..4223: mol_type = other DNA
cgttacataacttacggtaaatggcccgcctggctgaccgcccaacgacccccgcccattgacgtcaataatgacgtatgttcccatagtaacgccaatagggactttccattgacgtcaatgggtggagtatttacggtaaactgcccacttggcagtacatcaagtgtatcatatgccaagtacgccccctattgacgtcaatgacggtaaatggcccgcctggcattatgcccagtacatgaccttatgggactttcctacttggcagtacatctacgtattagtcatcgctattaccatggtgatgcggttttggcagtacatcaatgggcgtggatagcggtttgactcacggggatttccaagtctccaccccattgacgtcaatgggagtttgttttggcaccaaaatcaacgggactttccaaaatgtcgtaacaactccgccccattgacgcaaatgggcggtaggcgtgtacggtgggaggtctatataagcagagctggtttagtgaaccgtcagatccgctagcgctaccggactcagatcgccaccatgtacccctacgacgtgccagactacgcccctaagaagaagagaaaagtcggcggctctggcggcggaggatctggcggaggtggaagcggaggagccgagaacagcgaagaggacaagcactacctgatctttatcaaggtgttccagcaggccatgaagggcaacttcgccaagatgtacgccaaggccgaggacggcaaggaccctcctatcaagaaaaaagtggaacggctgcgggccgagctgaactactgttacgatgagctgagcttcaaagagtatctgagcgacttcctcgtcagaggtggcctgaacaaatacctgaaccagaatcaggccgagatcctgctgctgatcaagaagctgccctggcaagagctgagaatctgggccctgctggccattgccagctacaagcccaaagagaagcccatcagcaaggacgacagcctgacactgaacaaccagcagctcgaagagatgaacgacgagagcgaggaagagtgactagcataaccccttggggcgcactcctcaggtgcaggctgcctatcagaaggtggtggctggtgtggccaatgccctggctcacaaataccactgagatctttttccctctgccaaaaattatggggacatcatgaagccccttgagcatctgacttctggctaataaaggaaatttattttcattgcaatagtgtgttggaattttttgtgtctctcactcggaaggacatatgggagggcaaatcatttaaaacatcagaatgagtatttggtttagagtttggcaacatatgcccatatgctggctgccatgaacaaaggttggctataaagaggtcatcagtatatgaaacagccccctgctgtccattccttattccatagaaaagccttgacttgaggttagattttttttatattttgttttgtgttatttttttctttaacatccctaaaattttccttacatgttttactagccagatttttcctcctctcctgactactcccagtcatagctgtccctcttctcttatggagatccctcgacctgcagcccaagcttggcgtaatcatggtcatagctgtttcctgtgtgaaattgttatccgctcacaattccacacaacatacgagccggaagcataaagtgtaaagcctggggtgcctaatgagtgagctaactcacattaattgcgttgcgctcactgcccgctttccagtcgggaaacctgtcgtgccagcggatccgcatctcaattagtcagcaaccatagtcccgcccctaactccgcccatcccgcccctaactccgcccagttccgcccattctccgccccatggctgactaattttttttatttatgcagaggccgaggccgcctcggcctctgagctattccagaagtagtgaggaggcttttttggaggcctaggcttttgcaaaaagctaacttgtttattgcagcttataatggttacaaataaagcaatagcatcacaaatttcacaaataaagcatttttttcactgcattctagttgtggtttgtccaaactcatcaatgtatcttatcatgtctggatccgctgcattaatgaatcggccaacgcgcggggagaggcggtttgcgtattgggcgctcttccgcttcctcgctcactgactcgctgcgctcggtcgttcggctgcggcgagcggtatcagctcactcaaaggcggtaatacggttatccacagaatcaggggataacgcaggaaagaacatgtgagcaaaaggccagcaaaaggccaggaaccgtaaaaaggccgcgttgctggcgtttttccataggctccgcccccctgacgagcatcacaaaaatcgacgctcaagtcagaggtggcgaaacccgacaggactataaagataccaggcgtttccccctggaagctccctcgtgcgctctcctgttccgaccctgccgcttaccggatacctgtccgcctttctcccttcgggaagcgtggcgctttctcatagctcacgctgtaggtatctcagttcggtgtaggtcgttcgctccaagctgggctgtgtgcacgaaccccccgttcagcccgaccgctgcgccttatccggtaactatcgtcttgagtccaacccggtaagacacgacttatcgccactggcagcagccactggtaacaggattagcagagcgaggtatgtaggcggtgctacagagttcttgaagtggtggcctaactacggctacactagaagaacagtatttggtatctgcgctctgctgaagccagttaccttcggaaaaagagttggtagctcttgatccggcaaacaaaccaccgctggtagcggtggtttttttgtttgcaagcagcagattacgcgcagaaaaaaaggatctcaagaagatcctttgatcttttctacggggtctgacgctcagtggaacgaaaactcacgttaagggattttggtcatgagattatcaaaaaggatcttcacctagatccttttaaattaaaaatgaagttttaaatcaatctaaagtatatatgagtaaacttggtctgacagttaccaatgcttaatcagtgaggcacctatctcagcgatctgtctatttcgttcatccatagttgcctgactccccgtcgtgtagataactacgatacgggagggcttaccatctggccccagtgctgcaatgataccgcgagacccacgctcaccggctccagatttatcagcaataaaccagccagccggaagggccgagcgcagaagtggtcctgcaactttatccgcctccatccagtctattaattgttgccgggaagctagagtaagtagttcgccagttaatagtttgcgcaacgttgttgccattgctacaggcatcgtggtgtcacgctcgtcgtttggtatggcttcattcagctccggttcccaacgatcaaggcgagttacatgatcccccatgttgtgcaaaaaagcggttagctccttcggtcctccgatcgttgtcagaagtaagttggccgcagtgttatcactcatggttatggcagcactgcataattctcttactgtcatgccatccgtaagatgcttttctgtgactggtgagtactcaaccaagtcattctgagaatagtgtatgcggcgaccgagttgctcttgcccggcgtcaatacgggataataccgcgccacatagcagaactttaaaagtgctcatcattggaaaacgttcttcggggcgaaaactctcaaggatcttaccgctgttgagatccagttcgatgtaacccactcgtgcacccaactgatcttcagcatcttttactttcaccagcgtttctgggtgagcaaaaacaggaaggcaaaatgccgcaaaaaagggaataagggcgacacggaaatgttgaatactcatactcttcctttttcaatattattgaagcatttatcagggttattgtctcatgagcggatacatatttgaatgtatttagaaaaataaacaaataggggttccgcgcacatttccccgaaaagtgccacctgggtcgacattgattattgactagtaatagtaatcaattacggggtcattagttcatagcccatatatggagttccg

SEQ ID NO: 1198 - DNA, 4223 bp, synthetic construct
  misc_feature 1..4223: note = Synthetic
  source 1..4223: mol_type = other DNA
cgttacataacttacggtaaatggcccgcctggctgaccgcccaacgacccccgcccattgacgtcaataatgacgtatgttcccatagtaacgccaatagggactttccattgacgtcaatgggtggagtatttacggtaaactgcccacttggcagtacatcaagtgtatcatatgccaagtacgccccctattgacgtcaatgacggtaaatggcccgcctggcattatgcccagtacatgaccttatgggactttcctacttggcagtacatctacgtattagtcatcgctattaccatggtgatgcggttttggcagtacatcaatgggcgtggatagcggtttgactcacggggatttccaagtctccaccccattgacgtcaatgggagtttgttttggcaccaaaatcaacgggactttccaaaatgtcgtaacaactccgccccattgacgcaaatgggcggtaggcgtgtacggtgggaggtctatataagcagagctggtttagtgaaccgtcagatccgctagcgctaccggactcagatcgccaccatggccgagaacagcgaagaggacaagcactacctgatctttatcaaggtgttccagcaggccatgaagggcaacttcgccaagatgtacgccaaggccgaggacggcaaggaccctcctatcaagaaaaaagtggaacggctgcgggccgagctgaactactgttacgatgagctgagcttcaaagagtatctgagcgacttcctcgtcagaggtggcctgaacaaatacctgaaccagaatcaggccgagatcctgctgctgatcaagaagctgccctggcaagagctgagaatctgggccctgctggccattgccagctacaagcccaaagagaagcccatcagcaaggacgacagcctgacactgaacaaccagcagctcgaagagatgaacgacgagagcgaggaagagggaggatctggcggaggcggctctggcggcggtggaagcggaggacctaagaagaagagaaaagtctacccctacgacgtgccagactacgcctgactagcataaccccttggggcgcactcctcaggtgcaggctgcctatcagaaggtggtggctggtgtggccaatgccctggctcacaaataccactgagatctttttccctctgccaaaaattatggggacatcatgaagccccttgagcatctgacttctggctaataaaggaaatttattttcattgcaatagtgtgttggaattttttgtgtctctcactcggaaggacatatgggagggcaaatcatttaaaacatcagaatgagtatttggtttagagtttggcaacatatgcccatatgctggctgccatgaacaaaggttggctataaagaggtcatcagtatatgaaacagccccctgctgtccattccttattccatagaaaagccttgacttgaggttagattttttttatattttgttttgtgttatttttttctttaacatccctaaaattttccttacatgttttactagccagatttttcctcctctcctgactactcccagtcatagctgtccctcttctcttatggagatccctcgacctgcagcccaagcttggcgtaatcatggtcatagctgtttcctgtgtgaaattgttatccgctcacaattccacacaacatacgagccggaagcataaagtgtaaagcctggggtgcctaatgagtgagctaactcacattaattgcgttgcgctcactgcccgctttccagtcgggaaacctgtcgtgccagcggatccgcatctcaattagtcagcaaccatagtcccgcccctaactccgcccatcccgcccctaactccgcccagttccgcccattctccgccccatggctgactaattttttttatttatgcagaggccgaggccgcctcggcctctgagctattccagaagtagtgaggaggcttttttggaggcctaggcttttgcaaaaagctaacttgtttattgcagcttataatggttacaaataaagcaatagcatcacaaatttcacaaataaagcatttttttcactgcattctagttgtggtttgtccaaactcatcaatgtatcttatcatgtctggatccgctgcattaatgaatcggccaacgcgcggggagaggcggtttgcgtattgggcgctcttccgcttcctcgctcactgactcgctgcgctcggtcgttcggctgcggcgagcggtatcagctcactcaaaggcggtaatacggttatccacagaatcaggggataacgcaggaaagaacatgtgagcaaaaggccagcaaaaggccaggaaccgtaaaaaggccgcgttgctggcgtttttccataggctccgcccccctgacgagcatcacaaaaatcgacgctcaagtcagaggtggcgaaacccgacaggactataaagataccaggcgtttccccctggaagctccctcgtgcgctctcctgttccgaccctgccgcttaccggatacctgtccgcctttctcccttcgggaagcgtggcgctttctcatagctcacgctgtaggtatctcagttcggtgtaggtcgttcgctccaagctgggctgtgtgcacgaaccccccgttcagcccgaccgctgcgccttatccggtaactatcgtcttgagtccaacccggtaagacacgacttatcgccactggcagcagccactggtaacaggattagcagagcgaggtatgtaggcggtgctacagagttcttgaagtggtggcctaactacggctacactagaagaacagtatttggtatctgcgctctgctgaagccagttaccttcggaaaaagagttggtagctcttgatccggcaaacaaaccaccgctggtagcggtggtttttttgtttgcaagcagcagattacgcgcagaaaaaaaggatctcaagaagatcctttgatcttttctacggggtctgacgctcagtggaacgaaaactcacgttaagggattttggtcatgagattatcaaaaaggatcttcacctagatccttttaaattaaaaatgaagttttaaatcaatctaaagtatatatgagtaaacttggtctgacagttaccaatgcttaatcagtgaggcacctatctcagcgatctgtctatttcgttcatccatagttgcctgactccccgtcgtgtagataactacgatacgggagggcttaccatctggccccagtgctgcaatgataccgcgagacccacgctcaccggctccagatttatcagcaataaaccagccagccggaagggccgagcgcagaagtggtcctgcaactttatccgcctccatccagtctattaattgttgccgggaagctagagtaagtagttcgccagttaatagtttgcgcaacgttgttgccattgctacaggcatcgtggtgtcacgctcgtcgtttggtatggcttcattcagctccggttcccaacgatcaaggcgagttacatgatcccccatgttgtgcaaaaaagcggttagctccttcggtcctccgatcgttgtcagaagtaagttggccgcagtgttatcactcatggttatggcagcactgcataattctcttactgtcatgccatccgtaagatgcttttctgtgactggtgagtactcaaccaagtcattctgagaatagtgtatgcggcgaccgagttgctcttgcccggcgtcaatacgggataataccgcgccacatagcagaactttaaaagtgctcatcattggaaaacgttcttcggggcgaaaactctcaaggatcttaccgctgttgagatccagttcgatgtaacccactcgtgcacccaactgatcttcagcatcttttactttcaccagcgtttctgggtgagcaaaaacaggaaggcaaaatgccgcaaaaaagggaataagggcgacacggaaatgttgaatactcatactcttcctttttcaatattattgaagcatttatcagggttattgtctcatgagcggatacatatttgaatgtatttagaaaaataaacaaataggggttccgcgcacatttccccgaaaagtgccacctgggtcgacattgattattgactagtaatagtaatcaattacggggtcattagttcatagcccatatatggagttccg

SEQ ID NO: 1199 - DNA, 417 bp, synthetic construct
  misc_feature 1..417: note = Synthetic
  source 1..417: mol_type = other DNA
atggccgagaacagcgaagaggacaagcactacctgatctttatcaaggtgttccagcaggccatgaagggcaacttcgccaagatgtacgccaaggccgaggacggcaaggaccctcctatcaagaaaaaagtggaacggctgcgggccgagctgaactactgttacgatgagctgagcttcaaagagtatctgagcgacttcctcgtcagaggtggcctgaacaaatacctgaaccagaatcaggccgagatcctgctgctgatcaagaagctgccctggcaagagctgagaatctgggccctgctggccattgccagctacaagcccaaagagaagcccatcagcaaggacgacagcctgacactgaacaaccagcagctcgaagagatgaacgacgagagcgaggaagagtga

SEQ ID NO: 1200 - protein, 138 aa, synthetic construct
  REGION 1..138: note = Synthetic
MAENSEEDKHYLIFIKVFQQAMKGNFAKMYAKAEDGKDPPIKKKVERLRAELNYCYDELSFKEYLSDFLVRGGLNKYLNQNQAEILLLIKKLPWQELRIWALLAIASYKPKEKPISKDDSLTLNNQQLEEMNDESEEE

SEQ ID NO: 1201 - DNA, 5081 bp, synthetic construct
  misc_feature 1..5081: note = Synthetic
  source 1..5081: mol_type = other DNA
cgttacataacttacggtaaatggcccgcctggctgaccgcccaacgacccccgcccattgacgtcaataatgacgtatgttcccatagtaacgccaatagggactttccattgacgtcaatgggtggagtatttacggtaaactgcccacttggcagtacatcaagtgtatcatatgccaagtacgccccctattgacgtcaatgacggtaaatggcccgcctggcattatgcccagtacatgaccttatgggactttcctacttggcagtacatctacgtattagtcatcgctattaccatggtgatgcggttttggcagtacatcaatgggcgtggatagcggtttgactcacggggatttccaagtctccaccccattgacgtcaatgggagtttgttttggcaccaaaatcaacgggactttccaaaatgtcgtaacaactccgccccattgacgcaaatgggcggtaggcgtgtacggtgggaggtctatataagcagagctggtttagtgaaccgtcagatccgctagcgctaccggactcagatcgccaccatgtacccctacgacgtgccagactacgcccctaagaagaagagaaaagtcggcggctctggcggcggaggatctggcggaggtggaagcggaggaaccgacaagagaaaggacggcagcggcaagctgctgtactgtagcttctgtggcaagagccagcacgaagtgcggaagctgattgccggacctagcgtgtacatctgcgacgagtgtgtggacctgtgcaacgacatcatccgggaagagatcaaagaggtggcccctcacagagagagaagcgcccttcctacacctcacgagatccggaaccacctggacgactacgtgatcggacaagagcaggccaagaaagtgctggccgtggccgtgtacaaccactacaagagactgcggaacggcgacaccagcaacggcgtggaactgggcaagagcaacatcctgctgatcggccctacaggctctggcaagacactgctggctgagacactggccagactgctggatgtgcctttcaccatggccgacgccaccacactgacagaggccggatatgtgggcgaagatgtggaaaacatcatccagaaactgctgcagaaatgcgactacgacgtgcagaaagcccagcggggcatcgtgtatatcgacgagatcgacaagatcagccgcaagagcgacaaccccagcatcaccagagatgtgtctggcgaaggcgtgcagcaggctctgctgaaactgatcgagggaacagtggccgccgtgcctcctcaaggcggaagaaaacaccctcagcaagagttcctccaggtggacacctccaagatcctgttcatctgcggcggagcctttgccggcctggacaaagtgatcagccacagagtggaaaccggctccggcatcggatttggcgccacagtgaaggccaagtccgataaggcctctgagggcgaactgctggcacaggtggaacccgaggacctgatcaagttcggactgatccccgagttcatcggcagactgcctgtggtggccacactgaacgagctgtctgaggaagccctgatccagatcctgaaagagcccaagaacgccctgaccaagcagtatcaggccctgttcaacctggaaggcgtggacctggaattcagagatgaggccctggacgccattgccaaaaaggccatggctagaaagaccggcgctagaggcctgcggtctattgtggaagctgccctgctggacactatgtacgacctgcctagcatggaagatgtcgagaaggtggtcatcgacgagtccgtgatcgacggccagtctaagcctctgctgatctacggcaagcccgaagctcagcaggcttctggcgaatgactagcataaccccttggggcgcactcctcaggtgcaggctgcctatcagaaggtggtggctggtgtggccaatgccctggctcacaaataccactgagatctttttccctctgccaaaaattatggggacatcatgaagccccttgagcatctgacttctggctaataaaggaaatttattttcattgcaatagtgtgttggaattttttgtgtctctcactcggaaggacatatgggagggcaaatcatttaaaacatcagaatgagtatttggtttagagtttggcaacatatgcccatatgctggctgccatgaacaaaggttggctataaagaggtcatcagtatatgaaacagccccctgctgtccattccttattccatagaaaagccttgacttgaggttagattttttttatattttgttttgtgttatttttttctttaacatccctaaaattttccttacatgttttactagccagatttttcctcctctcctgactactcccagtcatagctgtccctcttctcttatggagatccctcgacctgcagcccaagcttggcgtaatcatggtcatagctgtttcctgtgtgaaattgttatccgctcacaattccacacaacatacgagccggaagcataaagtgtaaagcctggggtgcctaatgagtgagctaactcacattaattgcgttgcgctcactgcccgctttccagtcgggaaacctgtcgtgccagcggatccgcatctcaattagtcagcaaccatagtcccgcccctaactccgcccatcccgcccctaactccgcccagttccgcccattctccgccccatggctgactaattttttttatttatgcagaggccgaggccgcctcggcctctgagctattccagaagtagtgaggaggcttttttggaggcctaggcttttgcaaaaagctaacttgtttattgcagcttataatggttacaaataaagcaatagcatcacaaatttcacaaataaagcatttttttcactgcattctagttgtggtttgtccaaactcatcaatgtatcttatcatgtctggatccgctgcattaatgaatcggccaacgcgcggggagaggcggtttgcgtattgggcgctcttccgcttcctcgctcactgactcgctgcgctcggtcgttcggctgcggcgagcggtatcagctcactcaaaggcggtaatacggttatccacagaatcaggggataacgcaggaaagaacatgtgagcaaaaggccagcaaaaggccaggaaccgtaaaaaggccgcgttgctggcgtttttccataggctccgcccccctgacgagcatcacaaaaatcgacgctcaagtcagaggtggcgaaacccgacaggactataaagataccaggcgtttccccctggaagctccctcgtgcgctctcctgttccgaccctgccgcttaccggatacctgtccgcctttctcccttcgggaagcgtggcgctttctcatagctcacgctgtaggtatctcagttcggtgtaggtcgttcgctccaagctgggctgtgtgcacgaaccccccgttcagcccgaccgctgcgccttatccggtaactatcgtcttgagtccaacccggtaagacacgacttatcgccactggcagcagccactggtaacaggattagcagagcgaggtatgtaggcggtgctacagagttcttgaagtggtggcctaactacggctacactagaagaacagtatttggtatctgcgctctgctgaagccagttaccttcggaaaaagagttggtagctcttgatccggcaaacaaaccaccgctggtagcggtggtttttttgtttgcaagcagcagattacgcgcagaaaaaaaggatctcaagaagatcctttgatcttttctacggggtctgacgctcagtggaacgaaaactcacgttaagggattttggtcatgagattatcaaaaaggatcttcacctagatccttttaaattaaaaatgaagttttaaatcaatctaaagtatatatgagtaaacttggtctgacagttaccaatgcttaatcagtgaggcacctatctcagcgatctgtctatttcgttcatccatagttgcctgactccccgtcgtgtagataactacgatacgggagggcttaccatctggccccagtgctgcaatgataccgcgagacccacgctcaccggctccagatttatcagcaataaaccagccagccggaagggccgagcgcagaagtggtcctgcaactttatccgcctccatccagtctattaattgttgccgggaagctagagtaagtagttcgccagttaatagtttgcgcaacgttgttgccattgctacaggcatcgtggtgtcacgctcgtcgtttggtatggcttcattcagctccggttcccaacgatcaaggcgagttacatgatcccccatgttgtgcaaaaaagcggttagctccttcggtcctccgatcgttgtcagaagtaagttggccgcagtgttatcactcatggttatggcagcactgcataattctcttactgtcatgccatccgtaagatgcttttctgtgactggtgagtactcaaccaagtcattctgagaatagtgtatgcggcgaccgagttgctcttgcccggcgtcaatacgggataataccgcgccacatagcagaactttaaaagtgctcatcattggaaaacgttcttcggggcgaaaactctcaaggatcttaccgctgttgagatccagttcgatgtaacccactcgtgcacccaactgatcttcagcatcttttactttcaccagcgtttctgggtgagcaaaaacaggaaggcaaaatgccgcaaaaaagggaataagggcgacacggaaatgttgaatactcatactcttcctttttcaatattattgaagcatttatcagggttattgtctcatgagcggatacatatttgaatgtatttagaaaaataaacaaataggggttccgcgcacatttccccgaaaagtgccacctgggtcgacattgattattgactagtaatagtaatcaattacggggtcattagttcatagcccatatatggagttccg

SEQ ID NO: 1202 - DNA, 5081 bp, synthetic construct
  misc_feature 1..5081: note = Synthetic
  source 1..5081: mol_type = other DNA
cgttacataacttacggtaaatggcccgcctggctgaccgcccaacgacccccgcccattgacgtcaataatgacgtatgttcccatagtaacgccaatagggactttccattgacgtcaatgggtggagtatttacggtaaactgcccacttggcagtacatcaagtgtatcatatgccaagtacgccccctattgacgtcaatgacggtaaatggcccgcctggcattatgcccagtacatgaccttatgggactttcctacttggcagtacatctacgtattagtcatcgctattaccatggtgatgcggttttggcagtacatcaatgggcgtggatagcggtttgactcacggggatttccaagtctccaccccattgacgtcaatgggagtttgttttggcaccaaaatcaacgggactttccaaaatgtcgtaacaactccgccccattgacgcaaatgggcggtaggcgtgtacggtgggaggtctatataagcagagctggtttagtgaaccgtcagatccgctagcgctaccggactcagatcgccaccatgaccgacaagagaaaggacggcagcggcaagctgctgtactgtagcttctgtggcaagagccagcacgaagtgcggaagctgattgccggacctagcgtgtacatctgcgacgagtgtgtggacctgtgcaacgacatcatccgggaagagatcaaagaggtggcccctcacagagagagaagcgcccttcctacacctcacgagatccggaaccacctggacgactacgtgatcggacaagagcaggccaagaaagtgctggccgtggccgtgtacaaccactacaagagactgcggaacggcgacaccagcaacggcgtggaactgggcaagagcaacatcctgctgatcggccctacaggctctggcaagacactgctggctgagacactggccagactgctggatgtgcctttcaccatggccgacgccaccacactgacagaggccggatatgtgggcgaagatgtggaaaacatcatccagaaactgctgcagaaatgcgactacgacgtgcagaaagcccagcggggcatcgtgtatatcgacgagatcgacaagatcagccgcaagagcgacaaccccagcatcaccagagatgtgtctggcgaaggcgtgcagcaggctctgctgaaactgatcgagggaacagtggccgccgtgcctcctcaaggcggaagaaaacaccctcagcaagagttcctccaggtggacacctccaagatcctgttcatctgcggcggagcctttgccggcctggacaaagtgatcagccacagagtggaaaccggctccggcatcggatttggcgccacagtgaaggccaagtccgataaggcctctgagggcgaactgctggcacaggtggaacccgaggacctgatcaagttcggactgatccccgagttcatcggcagactgcctgtggtggccacactgaacgagctgtctgaggaagccctgatccagatcctgaaagagcccaagaacgccctgaccaagcagtatcaggccctgttcaacctggaaggcgtggacctggaattcagagatgaggccctggacgccattgccaaaaaggccatggctagaaagaccggcgctagaggcctgcggtctattgtggaagctgccctgctggacactatgtacgacctgcctagcatggaagatgtcgagaaggtggtcatcgacgagtccgtgatcgacggccagtctaagcctctgctgatctacggcaagcccgaagctcagcaggcttctggcgaaggaggatctggcggaggcggctctggcggcggtggaagcggaggacctaagaagaagagaaaagtctacccctacgacgtgccagactacgcctgactagcataaccccttggggcgcactcctcaggtgcaggctgcctatcagaaggtggtggctggtgtggccaatgccctggctcacaaataccactgagatctttttccctctgccaaaaattatggggacatcatgaagccccttgagcatctgacttctggctaataaaggaaatttattttcattgcaatagtgtgttggaattttttgtgtctctcactcggaaggacatatgggagggcaaatcatttaaaacatcagaatgagtatttggtttagagtttggcaacatatgcccatatgctggctgccatgaacaaaggttggctataaagaggtcatcagtatatgaaacagccccctgctgtccattccttattccatagaaaagccttgacttgaggttagattttttttatattttgttttgtgttatttttttctttaacatccctaaaattttccttacatgttttactagccagatttttcctcctctcctgactactcccagtcatagctgtccctcttctcttatggagatccctcgacctgcagcccaagcttggcgtaatcatggtcatagctgtttcctgtgtgaaattgttatccgctcacaattccacacaacatacgagccggaagcataaagtgtaaagcctggggtgcctaatgagtgagctaactcacattaattgcgttgcgctcactgcccgctttccagtcgggaaacctgtcgtgccagcggatccgcatctcaattagtcagcaaccatagtcccgcccctaactccgcccatcccgcccctaactccgcccagttccgcccattctccgccccatggctgactaattttttttatttatgcagaggccgaggccgcctcggcctctgagctattccagaagtagtgaggaggcttttttggaggcctaggcttttgcaaaaagctaacttgtttattgcagcttataatggttacaaataaagcaatagcatcacaaatttcacaaataaagcatttttttcactgcattctagttgtggtttgtccaaactcatcaatgtatcttatcatgtctggatccgctgcattaatgaatcggccaacgcgcggggagaggcggtttgcgtattgggcgctcttccgcttcctcgctcactgactcgctgcgctcggtcgttcggctgcggcgagcggtatcagctcactcaaaggcggtaatacggttatccacagaatcaggggataacgcaggaaagaacatgtgagcaaaaggccagcaaaaggccaggaaccgtaaaaaggccgcgttgctggcgtttttccataggctccgcccccctgacgagcatcacaaaaatcgacgctcaagtcagaggtggcgaaacccgacaggactataaagataccaggcgtttccccctggaagctccctcgtgcgctctcctgttccgaccctgccgcttaccggatacctgtccgcctttctcccttcgggaagcgtggcgctttctcatagctcacgctgtaggtatctcagttcggtgtaggtcgttcgctccaagctgggctgtgtgcacgaaccccccgttcagcccgaccgctgcgccttatccggtaactatcgtcttgagtccaacccggtaagacacgacttatcgccactggcagcagccactggtaacaggattagcagagcgaggtatgtaggcggtgctacagagttcttgaagtggtggcctaactacggctacactagaagaacagtatttggtatctgcgctctgctgaagccagttaccttcggaaaaagagttggtagctcttgatccggcaaacaaaccaccgctggtagcggtggtttttttgtttgcaagcagcagattacgcgcagaaaaaaaggatctcaagaagatcctttgatcttttctacggggtctgacgctcagtggaacgaaaactcacgttaagggattttggtcatgagattatcaaaaaggatcttcacctagatccttttaaattaaaaatgaagttttaaatcaatctaaagtatatatgagtaaacttggtctgacagttaccaatgcttaatcagtgaggcacctatctcagcgatctgtctatttcgttcatccatagttgcctgactccccgtcgtgtagataactacgatacgggagggcttaccatctggccccagtgctgcaatgataccgcgagacccacgctcaccggctccagatttatcagcaataaaccagccagccggaagggccgagcgcagaagtggtcctgcaactttatccgcctccatccagtctattaattgttgccgggaagctagagtaagtagttcgccagttaatagtttgcgcaacgttgttgccattgctacaggcatcgtggtgtcacgctcgtcgtttggtatggcttcattcagctccggttcccaacgatcaaggcgagttacatgatcccccatgttgtgcaaaaaagcggttagctccttcggtcctccgatcgttgtcagaagtaagttggccgcagtgttatcactcatggttatggcagcactgcataattctcttactgtcatgccatccgtaagatgcttttctgtgactggtgagtactcaaccaagtcattctgagaatagtgtatgcggcgaccgagttgctcttgcccggcgtcaatacgggataataccgcgccacatagcagaactttaaaagtgctcatcattggaaaacgttcttcggggcgaaaactctcaaggatcttaccgctgttgagatccagttcgatgtaacccactcgtgcacccaactgatcttcagcatcttttactttcaccagcgtttctgggtgagcaaaaacaggaaggcaaaatgccgcaaaaaagggaataagggcgacacggaaatgttgaatactcatactcttcctttttcaatattattgaagcatttatcagggttattgtctcatgagcggatacatatttgaatgtatttagaaaaataaacaaataggggttccgcgcacatttccccgaaaagtgccacctgggtcgacattgattattgactagtaatagtaatcaattacggggtcattagttcatagcccatatatggagttccg

SEQ ID NO: 1203 - DNA, 1275 bp, synthetic construct
  misc_feature 1..1275: note = Synthetic
  source 1..1275: mol_type = other DNA
atgaccgacaagagaaaggacggcagcggcaagctgctgtactgtagcttctgtggcaagagccagcacgaagtgcggaagctgattgccggacctagcgtgtacatctgcgacgagtgtgtggacctgtgcaacgacatcatccgggaagagatcaaagaggtggcccctcacagagagagaagcgcccttcctacacctcacgagatccggaaccacctggacgactacgtgatcggacaagagcaggccaagaaagtgctggccgtggccgtgtacaaccactacaagagactgcggaacggcgacaccagcaacggcgtggaactgggcaagagcaacatcctgctgatcggccctacaggctctggcaagacactgctggctgagacactggccagactgctggatgtgcctttcaccatggccgacgccaccacactgacagaggccggatatgtgggcgaagatgtggaaaacatcatccagaaactgctgcagaaatgcgactacgacgtgcagaaagcccagcggggcatcgtgtatatcgacgagatcgacaagatcagccgcaagagcgacaaccccagcatcaccagagatgtgtctggcgaaggcgtgcagcaggctctgctgaaactgatcgagggaacagtggccgccgtgcctcctcaaggcggaagaaaacaccctcagcaagagttcctccaggtggacacctccaagatcctgttcatctgcggcggagcctttgccggcctggacaaagtgatcagccacagagtggaaaccggctccggcatcggatttggcgccacagtgaaggccaagtccgataaggcctctgagggcgaactgctggcacaggtggaacccgaggacctgatcaagttcggactgatccccgagttcatcggcagactgcctgtggtggccacactgaacgagctgtctgaggaagccctgatccagatcctgaaagagcccaagaacgccctgaccaagcagtatcaggccctgttcaacctggaaggcgtggacctggaattcagagatgaggccctggacgccattgccaaaaaggccatggctagaaagaccggcgctagaggcctgcggtctattgtggaagctgccctgctggacactatgtacgacctgcctagcatggaagatgtcgagaaggtggtcatcgacgagtccgtgatcgacggccagtctaagcctctgctgatctacggcaagcccgaagctcagcaggcttctggcgaatga

SEQ ID NO: 1204 - protein, 424 aa, synthetic construct
  REGION 1..424: note = Synthetic
MTDKRKDGSGKLLYCSFCGKSQHEVRKLIAGPSVYICDECVDLCNDIIREEIKEVAPHRERSALPTPHEIRNHLDDYVIGQEQAKKVLAVAVYNHYKRLRNGDTSNGVELGKSNILLIGPTGSGKTLLAETLARLLDVPFTMADATTLTEAGYVGEDVENIIQKLLQKCDYDVQKAQRGIVYIDEIDKISRKSDNPSITRDVSGEGVQQALLKLIEGTVAAVPPQGGRKHPQQEFLQVDTSKILFICGGAFAGLDKVISHRVETGSGIGFGATVKAKSDKASEGELLAQVEPEDLIKFGLIPEFIGRLPVVATLNELSEEALIQILKEPKNALTKQYQALFNLEGVDLEFRDEALDAIAKKAMARKTGARGLRSIVEAALLDTMYDLPSMEDVEKVVIDESVIDGQSKPLLIYGKPEAQQASGE

SEQ ID NO: 1205 - protein, 5 aa, synthetic construct
RGDYC

SEQ ID NO: 1206 - protein, 5 aa, synthetic construct
ASSHN

SEQ ID NO: 1207 - protein, 6 aa, synthetic construct
KCCYSL

SEQ ID NO: 1208 - protein, 7 aa, synthetic construct
YEVGHRC

SEQ ID NO: 1209 - DNA, 10 bp, synthetic construct
  source 1..10: mol_type = other DNA
ccccctcccc
